(19) United States
(12) Patent Application Publication
(10) Pub. No.: US 2012/0090052 A1
(43) Pub. Date: Apr. 12, 2012

(54) Plants Having Enhanced Yield-Related Traits And A Method For Making The Same

(76) Inventors: Ana Isabel Sanz Molinero, Gentbrugge (BE); Valerie Frankard, Waterloo (BE); Yves Hatzfeld, Lille (FR)

(21) Appl. No.: 13/266,989

(22) PCT Filed: Apr. 27, 2010
(86) PCT No.: PCT/EP2010/055579

§ 371 Date: Nov. 21, 2011

Related U.S. Application Data
(60) Provisional application No. 61/180,942, filed on May 26, 2009.
(60) Provisional application No. 61/180,946, filed on May 26, 2009.
(60) Provisional application No. 61/180,945, filed on May 26, 2009.
(60) Provisional application No. 61/181,688, filed on May 28, 2009.
(60) Provisional application No. 61/181,692, filed on May 28, 2009.

(30) Foreign Application Priority Data
Apr. 29, 2009 (EP) 09100257.6
Apr. 29, 2009 (EP) 09100259.2
Apr. 29, 2009 (EP) 09100260.0
Apr. 29, 2009 (EP) 09100262.6
Apr. 29, 2009 (EP) 09100263.4

(51) Int. Cl. C12N 15/82; A01H 5/10; C12N 15/63; C12N 9/14; C12N 15/29; C07K 14/415; C12N 15/55; A01H 5/00; C12N 5/10

(52) U.S. Cl. 800/290; 800/278; 800/298; 435/320.1; 435/419; 800/320.1; 800/320.2; 800/320.3; 800/320; 536/23.6; 530/370; 536/23.2; 435/195

(57) ABSTRACT

The present invention relates generally to the field of molecular biology and concerns a method for enhancing various yield-related traits and/or plant growth characteristics in plants by modulating expression in a plant of a nucleic acid encoding a C3H-like polypeptide, or a SPATULA-like (SPT) polypeptide, or an IDI2 (Iron Deficiency Induced 2) polypeptide, or an eIF4F-like protein complex subunit, or GR-RBP (Glycine Rich-RNA Binding Protein) polypeptide. The present invention also concerns plants having modulated expression and/or activity of a nucleic acid encoding a C3H-like polypeptide, or a SPATULA-like (SPT) polypeptide, or an IDI2 (Iron Deficiency Induced 2) polypeptide, or an eIF4F-like protein complex subunit, or GR-RBP (Glycine Rich-RNA Binding Protein) polypeptide, which plants have enhanced yield-related traits and/or plant growth characteristics relative to corresponding wild type plants or other control plants. The invention also provides constructs useful in the methods of the invention.

[0001] The present invention relates generally to the field of molecular biology and concerns a method for enhancing various yield-related traits in plants by modulating expression in a plant of a nucleic acid encoding a C3H-like polypeptide. The present invention also concerns plants having modulated expression of a nucleic acid encoding a C3H-like polypeptide, which plants have enhanced yield-related traits relative to corresponding wild type plants or other control plants. The invention also provides constructs useful in the methods of the invention.

[0002] The present invention relates generally to the field of molecular biology and concerns a method for enhancing various yield-related traits by modulating expression in a plant of a nucleic acid encoding a SPATULA-like (SPT) polypeptide. The present invention also concerns plants having modulated expression of a nucleic acid encoding an SPT-like polypeptide, which plants have enhanced yield-related traits relative to corresponding wild type plants or other control plants. The invention also provides constructs useful in the methods of the invention.

[0003] The present invention relates generally to the field of molecular biology and concerns a method for improving various plant growth characteristics by modulating expression in a plant of a nucleic acid encoding an IDI2 (Iron Deficiency Induced 2) polypeptide. The present invention also concerns plants having modulated expression of a nucleic acid encoding an IDI2 polypeptide, which plants have improved growth characteristics relative to corresponding wild type plants or other control plants. The invention also provides constructs useful in the methods of the invention.

[0004] The present invention relates generally to the field of molecular biology and concerns a method for improving various plant growth characteristics by modulating the activity in a plant of an eIF4F-like protein complex. The present invention also concerns plants having modulated activity of eIF4F-like protein complex, which plants have enhanced growth characteristics relative to corresponding wild type plants or other control plants. The invention also provides constructs useful in the methods of the invention.

[0005] The present invention relates generally to the field of molecular biology and concerns a method for improving various plant growth characteristics by modulating expression in a plant of a nucleic acid encoding a GR-RBP (Glycine Rich-RNA Binding Protein) polypeptide. The present invention also concerns plants having modulated expression of a nucleic acid encoding a GR-RBP polypeptide, which plants have improved growth characteristics relative to corresponding wild type plants or other control plants. The invention also provides constructs useful in the methods of the invention.

[0006] The ever-increasing world population and the dwindling supply of arable land available for agriculture fuels research towards increasing the efficiency of agriculture. Conventional means for crop and horticultural improvements utilise selective breeding techniques to identify plants having desirable characteristics. However, such selective breeding techniques have several drawbacks, namely that these techniques are typically labour intensive and result in plants that often contain heterogeneous genetic components that may not always result in the desirable trait being passed on from parent plants. Advances in molecular biology have allowed mankind to modify the germplasm of animals and plants. Genetic engineering of plants entails the isolation and manipulation of genetic material (typically in the form of DNA or RNA) and the subsequent introduction of that genetic material into a plant. Such technology has the capacity to deliver crops or plants having various improved economic, agronomic or horticultural traits.

[0007] A trait of particular economic interest is increased yield. Yield is normally defined as the measurable produce of economic value from a crop. This may be defined in terms of quantity and/or quality. Yield is directly dependent on several factors, for example, the number and size of the organs, plant architecture (for example, the number of branches), seed production, leaf senescence and more. Root development, nutrient uptake, stress tolerance and early vigour may also be important factors in determining yield. Optimizing the above-mentioned factors may therefore contribute to increasing crop yield.

[0008] Seed yield is a particularly important trait, since the seeds of many plants are important for human and animal nutrition. Crops such as corn, rice, wheat, canola and soybean account for over half the total human caloric intake, whether through direct consumption of the seeds themselves or through consumption of meat products raised on processed seeds. They are also a source of sugars, oils and many kinds of metabolites used in industrial processes. Seeds contain an embryo (the source of new shoots and roots) and an endosperm (the source of nutrients for embryo growth during germination and during early growth of seedlings). The development of a seed involves many genes, and requires the transfer of metabolites from the roots, leaves and stems into the growing seed. The endosperm, in particular, assimilates the metabolic precursors of carbohydrates, oils and proteins and synthesizes them into storage macromolecules to fill out the grain.

[0009] Another important trait for many crops is early vigour. Improving early vigour is an important objective of modern rice breeding programs in both temperate and tropical rice cultivars. Long roots are important for proper soil anchorage in water-seeded rice. Where rice is sown directly into flooded fields, and where plants must emerge rapidly through water, longer shoots are associated with vigour. Where drill-seeding is practiced, longer mesocotyls and coleoptiles are important for good seedling emergence. The ability to engineer early vigour into plants would be of great importance in agriculture. For example, poor early vigour has been a limitation to the introduction of maize (Zea mays L.) hybrids based on Corn Belt germplasm in the European Atlantic.

[0010] A further important trait is that of improved abiotic stress tolerance. Abiotic stress is a primary cause of crop loss worldwide, reducing average yields for most major crop plants by more than 50% (Wang et al., Planta (2003) 218: 1-14). Abiotic stresses may be caused by drought, salinity, extremes of temperature, chemical toxicity, excess or deficiency of nutrients (macroelements and/or microelements), radiation and oxidative stress. The ability to improve plant tolerance to abiotic stress would be of great economic advantage to farmers worldwide and would allow for the cultivation of crops during adverse conditions and in territories where cultivation of crops may not otherwise be possible.

[0011] Crop yield may therefore be increased by optimising one of the above-mentioned factors.

[0012] Depending on the end use, the modification of certain yield traits may be favoured over others. For example for applications such as forage or wood production, or bio-fuel resource, an increase in the vegetative parts of a plant may be desirable, and for applications such as flour, starch or oil production, an increase in seed parameters may be particularly desirable. Even amongst the seed parameters, some may be favoured over others, depending on the application. Various mechanisms may contribute to increasing seed yield, whether that is in the form of increased seed size or increased seed number.

[0013] One approach to increasing yield (seed yield and/or biomass) in plants may be through modification of the inherent growth mechanisms of a plant, such as the cell cycle or various signalling pathways involved in plant growth or in defense mechanisms.

[0014] It has been now found that various yield-related traits may be enhanced in plants by modulating expression in a plant of a nucleic acid encoding a C3H-like polypeptide in a plant.

[0015] It has also now been found that various yield-related traits may be enhanced in plants by modulating expression in a plant of a nucleic acid encoding an SPT-like polypeptide.

[0016] It has also now been found that various growth characteristics may be improved in plants by modulating expression in a plant of a nucleic acid encoding an IDI2 (Iron Deficiency Induced 2) in a plant.

[0017] It has also now been found that various growth characteristics may be improved in plants by modulating the activity in a plant of at least a nucleic acid encoding an eIF4F-like protein complex subunit polypeptide and/or the level of the said protein complex.

[0018] It has also now been found that various growth characteristics may be improved in plants by modulating expression in a plant of a nucleic acid encoding a GR-RBP (Glycine Rich-RNA Binding Protein) in a plant.

### BACKGROUND

### 1. C3H-Like Polypeptides

[0019] One of the most abundant domains detected in the Arabidopsis proteome is the RING-finger domain. The RING domain was originally named after the acronym for the protein in which it was first found, encoded by the Really Interesting New Gene. The RING-finger domain is related to the zinc-finger domain; however zinc fingers consist of two pairs of zinc ligands co-ordinately binding one zinc ion, whereas RING fingers consist of four pairs of ligands binding two ions. The RING domain can basically be considered a protein-interaction domain.

[0020] The RING finger domain comprises different types of subdomains, namely the C3HC4-type and C3H2C3-type, also referred to as RING-HC and RING H2, respectively.

### 2. SPATULA-Like (SPT) Polypeptides

[0021] The basic/helix-loop-helix (bHLH) transcription factors and their homologues form a large family in plant and animal genomes. Li et al., 2006 (Plant Physiol August; 141(4): 1167-84) identified 167 bHLH genes in the rice genome and reported that their phylogenetic analysis indicates that they form well-supported clades. The phylogeny of bHLH proteins from Arabidopsis thaliana have also been studied, see Toledo-Ortiz et al., 2003 (Plant Cell, August; 15(8): 1749-70); Buck and Atchley, 2003 (J Mol. Evol. June; 56(6):742-50).

[0022] SPATULA is a bHLH transcription factor. Groszmann et al., 2008 (Plant Journal, July 55(1):40-52) described the SPATULA (SPT) gene as being involved in generating the septum, style and stigma. They also identified twelve orthologues of AtSPT in eudicots, rice and a gymnosperm. They identified two conserved structural domains in addition to the BHLH domain: an amphipathic helix and an acidic domain. SPATULA has also been reported to be a light-stable repressor of seed germination, see Penfield et al. 2005 (Curr Biol. November 22; 15(22): 1988-2006).

### 3. IDI2 (Iron Deficiency Induced 2) Polypeptides

[0023] The Fe-deficiency inducible cDNA IDI2 was for the first time isolated from iron-deficient barley roots. The encoded protein had a low similarity with alpha subunits of eukaryotic initiation factor 2B (Yamaguchi et al., J. Exp. Bot. 51, 2001-2007, 2000), which is a guanine nucleotide exchange factor (GEF) that plays a key role in the regulation of protein synthesis. Translation of mRNA begins with the binding of initiator Met-tRNAᵢ to the 40 S ribosomal subunit and is mediated by eIF-2 as part of the eIF-2•GTP•Met-tRNAᵢ ternary complex. During the initiation process, the GTP bound to eIF-2 is hydrolyzed, and a binary complex consisting of eIF-2 and GDP is released from the 80 S initiation complex. Since eIF-2 has a 100-400-fold higher affinity for GDP than for GTP, the guanine nucleotide exchange factor (GEF) known as eIF-2B is required to regenerate the GTP-bound form of eIF-2, which can then participate in another cycle of translation initiation.

[0024] The eukaryotic translation initiation factor eIF-2B is a complex made up of five different subunits, alpha, beta, gamma, delta and epsilon, and catalyzes the exchange of eIF-2-bound GDP for GTP. This family includes initiation factor 2B alpha, beta and delta subunits from eukaryotes, related proteins from archaebacteria and IF-2 from prokaryotes, and also contains a subfamily of proteins in eukaryotes, archaeae, or eubacteria. The IDI2 protein is part of a family of eIF2Balpha-like proteins, which family differs from the eIF2Balpha/beta/delta family. Members of this family have also been characterised as 5-methylthioribose-1-phosphate isomerases, an enzyme of the methionine salvage pathway.

[0025] Transcription of IDI2 is induced upon iron or zinc deficiency, but not by copper or manganese deficiency (Yamaguchi et al., 2000). Expression of IDI2 did not differ significantly between boron-tolerant and boron-intolerant plants (Patterson et al., Plant Physiol. 144, 1612-1631, 2007). It was postulated that IDI2 functions in regulating the synthesis rate of proteins required for adaptation to Fe-deficiency (Yamaguchi et al., 2000), in particular in initiation of translation (Negishi et al., Plant J., 30, 83-94, 2002).

4. eIF4F-Like Protein Complex Subunits

[0026] Protein synthesis is controlled by different mechanisms in prokaryotes and eukaryotes. In eukaryotes, such mechanisms involve several multisubunit complexes including eukaryotic translation initiation factor (eIFs). Usually initiator tRNA, 40S and 60S ribosomal subunits are assembled by eIFs into an 80S ribosome at the initiation codon of mRNA. Therefore, the initiation translation mechanism is considered as to be rate-limiting for protein translation.

[0027] The two major complexes involved in translation initiation are the eIF4F, which binds to the 7mGppp cap of the mRNA and recruits the 43S complex, and the 43S complex, which bring the 40 ribosome subunit to the 5′UTR and allow 5′scanning to the correct initiation AUG codon. Both the eIF4F (complex of eIF4E+eIF4G+eIF4A) and eIF(iso)4F (complex of eIF(iso)4E+eIF(iso)4G+eIF4A) have similar activities in supporting the initiation of translation in vitro (Lax et al., Mechanisms of Development, Volume 122, Issues 7-8, July 2005, Pp. 865-876; Browning et al., J. Biol. Chem. 267 (1992), pp. 10096-10100).

[0028] The eIF4E polypeptide binds with eIF4G and eIF4A to form the eIF4F protein complex, which serves as a scaffold for the assembly of other initiation factors such as eIF4B, eIF3, and poly(A)-binding proteins.

[0029] Other factors involved in translation are eIF5, which allows the dissociation of all the 43S complex when the initiation AUG is met. Then eIF5B promotes association of the 60S and 40S subunits of the ribosome and translation actually starts. PolyA binding proteins bind to eIF4F, bringing the START and END of the CDS close to each other, for efficient recycling of the ribosome 40S subunit.

[0030] In plants, eIF4 isoF is composed of eIF4 isoE, isoG and eIF4A subunits. The “iso” subunits are functional equivalents of the “normal” subunits, usually much shorter and with little sequence homology with their normal counterpart.

[0031] In eukaryotes, eIF4F seems to play different roles; in animals, eIF4E is an oncongene which mechanism acts by suppression of apoptose. Overexpression of rice eIF4 isoG could increase susceptibility to yellow mottle virus if the allele is a sensititive allele. eIF5A is commonly associated with programmed cell death and its overexpression in plants leads to conflicting results: severe growth defects (Hopkins et al., Plant Physiology, September 2008, Vol. 148, pp. 479-489) or increased rosette size (Liu et al., Journal of Experimental Botany, Vol. 59, No. 4, pp. 939-950, 2008).

[0032] Daniel R. Gallie (Plant Molecular Biology 50: 949-970, 2002.) discloses protein-protein interactions required during translation but only focusing on those involved in the translation of nuclear genes as the translation machinery of the chloroplast and mitochondrion is prokaryotic in origin. Therefore, the role of several eIFs in the translation mechanisms is presented. Both plant eIF4G, the larger subunit of eIF4F, and eIF4A are mentioned in this document and their role during initiation in plants. However, it is also evident that little is known regarding their role on the initiation process and no relation can be established between their contributions to this process and enhanced yield-related traits.

[0033] The document Albar et al. (Mutations in the eIF(iso)4G translation initiation factor confer high resistance of rice to Rice yellow mottle virus—The Plant Journal (2006) 47, 417-426) discloses the role of isoform of IF4G in the occurring interactions in rice and virus resistance, namely regarding Rice yellow mottle virus (RYMV). Again, no relation was established between the subject matter of the referred document and enhanced yield-related traits, unless plants are severely infected by virus.

[0034] Other documents refer to plant eIF4F, such as Laura K. Mayberry et al. (Methods in Enzymology, Volume 430, Chapter 15—pp. 397-408—Elsevier 2007) referring to the expression and purification of recombinant wheat eIFs but again nothing is disclosed on the effects or application to methodologies for enhancing yield-related traits.

[0035] The method of the present invention refers to a method for obtaining plants having enhanced yield-related traits and plants thereof.

### 5. GR-RBP (Glycine Rich-RNA Binding Protein) Polypeptide

[0036] The genome of Arabidopsis thaliana encodes over 200 different RNA Binding Proteins (RBPs). These RBPs play a role in post-transcriptional gene regulation in developmental processes (reviewed by Lorković, Trends in Plant Science, 2009), as they bind to splice sites and to binding sites for splicing factors on nascent pre-mRNAs, thus competing with splicing factors to negatively control splicing. Most of the RBPs are plant specific and may be involved in plant specific functions. The group of RBPs comprises a superfamily of glycine-rich RNA-binding proteins (GR-RBPs; Wang & Brendel, Genome Biol. 5, R102, 2004). GR-RBPs typically comprise RNA recognition motifs (RRMs) at the N-terminus and a C-terminal glycine-rich domain (GD).

[0037] Although GR-RBPs are reportedly involved in diverse developmental processes, including in adaptation of plants to various environmental conditions, overexpression of GR-RBPs also resulted in adverse effects on plant growth: GR-RBP4 expression in Arabidopsis for example caused retarded germination and did not increase cold- or freezing tolerance (Kwak et al. J. Exp. Bot. 56, 3007-3016, 2005). For other RBPs, an effect on cold stress or high temperature stress was only shown in microorganisms (Kwak et al. Nucl. Ac. Res. 35, 506-516, 2007; Sahi et al., Plant Science 173, 144-155, 2007).

### SUMMARY

### 1. C3H-Like Polypeptides

[0038] Surprisingly, it has now been found that modulating expression of a nucleic acid encoding a polypeptide comprising a RING domain of the C3H2C3-type gives plants having enhanced yield-related traits relative to control plants.

[0039] According to one embodiment, there is provided a method for enhancing various yield-related traits relative to control plants, comprising modulating expression of a nucleic acid encoding a C3H-like polypeptide in a plant.

### 2. SPATULA-Like (SPT) Polypeptides

[0040] Surprisingly, it has now been found that modulating expression of a nucleic acid encoding an SPT-like polypeptide gives plants having enhanced yield-related traits relative to control plants.

[0041] According to one embodiment, there is provided a method for enhancing yield-related traits relative to control plants, comprising modulating expression in a plant of a nucleic acid encoding an SPT-like polypeptide in a plant.

### 3. IDI2 (Iron Deficiency Induced 2) Polypeptides

[0042] Surprisingly, it has now been found that modulating expression of a nucleic acid encoding an IDI2 polypeptide gives plants having enhanced yield-related traits, in particular increased yield and/or early vigour relative to control plants.

[0043] According to one embodiment, there is provided a method for improving yield-related traits of a plant relative to control plants, comprising modulating expression of a nucleic acid encoding an IDI2 polypeptide in a plant.

4. eIF4F-Like Protein Complex Subunits

[0044] The present invention relates generally to the field of molecular biology and concerns a method for improving various plant growth characteristics by modulating the activity of an eIF4F-like protein complex. The present invention also concerns plants having modulated activity of an eIF4F-like protein complex, which plants have enhanced growth characteristics relative to corresponding wild type plants or other control plants. The invention also provides constructs useful in the methods of the invention.

[0045] Surprisingly, it has now been found that modulating the activity of an eIF4F-like protein complex gives plants having enhanced yield-related traits, in particular increased yield relative to control plants.

[0046] According to one embodiment, there is provided a method for improving yield related traits of a plant relative to control plants, comprising modulating the activity of an eIF4F-like protein complex in a plant.

### 5. GR-RBP (Glycine Rich-RNA Binding Protein) Polypeptides

[0047] Surprisingly, it has now been found that modulating expression of a nucleic acid encoding a GR-RBP polypeptide gives plants having enhanced yield-related traits, in particular increased yield and/or early vigour, relative to control plants.

[0048] According to one embodiment, there is provided a method for improving yield-related traits of a plant relative to control plants, comprising modulating expression of a nucleic acid encoding a GR-RBP polypeptide in a plant.

### DEFINITIONS

### Polypeptide(s)/Protein(s)

[0049] The terms “polypeptide” and “protein” are used interchangeably herein and refer to amino acids in a polymeric form of any length, linked together by peptide bonds.

### Polynucleotide(s)/Nucleic Acid(s)/Nucleic Acid Sequence(s)/Nucleotide Sequence(s)

[0050] The terms “polynucleotide(s)”, “nucleic acid sequence(s)”, “nucleotide sequence(s)”, “nucleic acid(s)”, “nucleic acid molecule” are used interchangeably herein and refer to nucleotides, either ribonucleotides or deoxyribonucleotides or a combination of both, in a polymeric unbranched form of any length.

### Homologue(s)

[0051] “Homologues” of a protein encompass peptides, oligopeptides, polypeptides, proteins and enzymes having amino acid substitutions, deletions and/or insertions relative to the unmodified protein in question and having similar biological and functional activity as the unmodified protein from which they are derived.

[0052] A deletion refers to removal of one or more amino acids from a protein.

[0053] An insertion refers to one or more amino acid residues being introduced into a predetermined site in a protein. Insertions may comprise N-terminal and/or C-terminal fusions as well as intra-sequence insertions of single or multiple amino acids. Generally, insertions within the amino acid sequence will be smaller than N- or C-terminal fusions, of the order of about 1 to 10 residues. Examples of N- or C-terminal fusion proteins or peptides include the binding domain or activation domain of a transcriptional activator as used in the yeast two-hybrid system, phage coat proteins, (histidine)-6-tag, glutathione S-transferase-tag, protein A, maltose-binding protein, dihydrofolate reductase, Tag•100 epitope, c-myc epitope, FLAG®-epitope, lacZ, CMP (calmodulin-binding peptide), HA epitope, protein C epitope and VSV epitope.

[0054] A substitution refers to replacement of amino acids of the protein with other amino acids having similar properties (such as similar hydrophobicity, hydrophilicity, antigenicity, propensity to form or break α-helical structures or β-sheet structures). Amino acid substitutions are typically of single residues, but may be clustered depending upon functional constraints placed upon the polypeptide and may range from 1 to 10 amino acids; insertions will usually be of the order of about 1 to 10 amino acid residues. The amino acid substitutions are preferably conservative amino acid substitutions. Conservative substitution tables are well known in the art (see for example Creighton (1984) Proteins. W.H. Freeman and Company (Eds) and Table 1 below).

TABLE 1
Examples of conserved amino acid substitutions

| | Conservative |
|---|---|
| Residue | Substitutions |
| Ala | Ser |
| Arg | Lys |
| Asn | Gln; His |
| Asp | Glu |
| Gln | Asn |
| Cys | Ser |
| Glu | Asp |
| Gly | Pro |
| His | Asn; Gln |
| Ile | Leu, Val |
| Leu | Ile; Val |
| Lys | Arg; Gln |
| Met | Leu; Ile |
| Phe | Met; Leu; Tyr |
| Ser | Thr; Gly |
| Thr | Ser; Val |
| Trp | Tyr |
| Tyr | Trp; Phe |
| Val | Ile; Leu |

[0055] Amino acid substitutions, deletions and/or insertions may readily be made using peptide synthetic techniques well known in the art, such as solid phase peptide synthesis and the like, or by recombinant DNA manipulation. Methods for the manipulation of DNA sequences to produce substitution, insertion or deletion variants of a protein are well known in the art. For example, techniques for making substitution mutations at predetermined sites in DNA are well known to those skilled in the art and include M13 mutagenesis, T7-Gen in vitro mutagenesis (USB, Cleveland, Ohio), QuickChange Site Directed mutagenesis (Stratagene, San Diego, Calif.), PCR-mediated site-directed mutagenesis or other site-directed mutagenesis protocols.

### Derivatives

[0056] “Derivatives” include peptides, oligopeptides, polypeptides which may, compared to the amino acid sequence of the naturally-occurring form of the protein, such as the protein of interest, comprise substitutions of amino acids with non-naturally occurring amino acid residues, or additions of non-naturally occurring amino acid residues. “Derivatives” of a protein also encompass peptides, oligopeptides, polypeptides which comprise naturally occurring altered (glycosylated, acylated, prenylated, phosphorylated, myristoylated, sulphated etc.) or non-naturally altered amino acid residues compared to the amino acid sequence of a naturally-occurring form of the polypeptide. A derivative may also comprise one or more non-amino acid substituents or additions compared to the amino acid sequence from which it is derived, for example a reporter molecule or other ligand, covalently or non-covalently bound to the amino acid sequence, such as a reporter molecule which is bound to facilitate its detection, and non-naturally occurring amino acid residues relative to the amino acid sequence of a naturally-occurring protein. Furthermore, “derivatives” also include fusions of the naturally-occurring form of the protein with tagging peptides such as FLAG, HIS6 or thioredoxin (for a review of tagging peptides, see Terpe, Appl. Microbiol. Biotechnol. 60, 523-533, 2003).

### Orthologue(s)/Paralogue(s)

[0057] Orthologues and paralogues encompass evolutionary concepts used to describe the ancestral relationships of genes. Paralogues are genes within the same species that have originated through duplication of an ancestral gene; orthologues are genes from different organisms that have originated through speciation, and are also derived from a common ancestral gene.

### Domain, Motif/Consensus Sequence/Signature

[0058] The term “domain” refers to a set of amino acids conserved at specific positions along an alignment of sequences of evolutionarily related proteins. While amino acids at other positions can vary between homologues, amino acids that are highly conserved at specific positions indicate amino acids that are likely essential in the structure, stability or function of a protein. Identified by their high degree of conservation in aligned sequences of a family of protein homologues, they can be used as identifiers to determine if any polypeptide in question belongs to a previously identified polypeptide family.

[0059] The term “motif” or “consensus sequence” or “signature” refers to a short conserved region in the sequence of evolutionarily related proteins. Motifs are frequently highly conserved parts of domains, but may also include only part of the domain, or be located outside of conserved domain (if all of the amino acids of the motif fall outside of a defined domain).

[0060] Specialist databases exist for the identification of domains, for example, SMART (Schultz et al. (1998) Proc. Natl. Acad. Sci. USA 95, 5857-5864; Letunic et al. (2002) Nucleic Acids Res 30, 242-244), InterPro (Mulder et al., (2003) Nucl. Acids. Res. 31, 315-318), Prosite (Bucher and Bairoch (1994), A generalized profile syntax for biomolecular sequences motifs and its function in automatic sequence interpretation. (In) ISMB-94; Proceedings 2nd International Conference on Intelligent Systems for Molecular Biology. Altman R., Brutlag D., Karp P., Lathrop R., Searls D., Eds., pp 53-61, AAAI Press, Menlo Park; Hulo et al., Nucl. Acids. Res. 32:D134-D137, (2004)), or Pfam (Bateman et al., Nucleic Acids Research 30(1): 276-280 (2002)). A set of tools for in silico analysis of protein sequences is available on the ExPASy proteomics server (Swiss Institute of Bioinformatics (Gasteiger et al., ExPASy: the proteomics server for in-depth protein knowledge and analysis, Nucleic Acids Res. 31:3784-3788 (2003)). Domains or motifs may also be identified using routine techniques, such as by sequence alignment.

[0061] Methods for the alignment of sequences for comparison are well known in the art, such methods include GAP, BESTFIT, BLAST, FASTA and TFASTA. GAP uses the algorithm of Needleman and Wunsch ((1970) J Mol Biol 48: 443-453) to find the global (i.e. spanning the complete sequences) alignment of two sequences that maximizes the number of matches and minimizes the number of gaps. The BLAST algorithm (Altschul et al. (1990) J Mol Biol 215: 403-10) calculates percent sequence identity and performs a statistical analysis of the similarity between the two sequences. The software for performing BLAST analysis is publicly available through the National Centre for Biotechnology Information (NCBI). Homologues may readily be identified using, for example, the ClustalW multiple sequence alignment algorithm (version 1.83), with the default pairwise alignment parameters, and a scoring method in percentage. Global percentages of similarity and identity may also be determined using one of the methods available in the MatGAT software package (Campanella et al., BMC Bioinformatics. 2003 Jul. 10; 4:29. MatGAT: an application that generates similarity/identity matrices using protein or DNA sequences.). Minor manual editing may be performed to optimise alignment between conserved motifs, as would be apparent to a person skilled in the art. Furthermore, instead of using full-length sequences for the identification of homologues, specific domains may also be used. The sequence identity values may be determined over the entire nucleic acid or amino acid sequence or over selected domains or conserved motif(s), using the programs mentioned above using the default parameters. For local alignments, the Smith-Waterman algorithm is particularly useful (Smith T F, Waterman M S (1981) J. Mol. Biol. 147(1); 195-7).

### Reciprocal BLAST

[0062] Typically, this involves a first BLAST involving BLASTing a query sequence (for example using any of the sequences listed in Table A of the Examples section) against any sequence database, such as the publicly available NCBI database. BLASTN or TBLASTX (using standard default values) are generally used when starting from a nucleotide sequence, and BLASTP or TBLASTN (using standard default values) when starting from a protein sequence. The BLAST results may optionally be filtered. The full-length sequences of either the filtered results or non-filtered results are then BLASTed back (second BLAST) against sequences from the organism from which the query sequence is derived. The results of the first and second BLASTs are then compared. A paralogue is identified if a high-ranking hit from the first blast is from the same species as from which the query sequence is derived, a BLAST back then ideally results in the query sequence amongst the highest hits; an orthologue is identified if a high-ranking hit in the first BLAST is not from the same species as from which the query sequence is derived, and preferably results upon BLAST back in the query sequence being among the highest hits.

[0063] High-ranking hits are those having a low E-value. The lower the E-value, the more significant the score (or in other words the lower the chance that the hit was found by chance). Computation of the E-value is well known in the art. In addition to E-values, comparisons are also scored by percentage identity. Percentage identity refers to the number of identical nucleotides (or amino acids) between the two compared nucleic acid (or polypeptide) sequences over a particular length. In the case of large families, ClustalW may be used, followed by a neighbour joining tree, to help visualize clustering of related genes and to identify orthologues and paralogues.

### Hybridisation

[0064] The term “hybridisation” as defined herein is a process wherein substantially homologous complementary nucleotide sequences anneal to each other. The hybridisation process can occur entirely in solution, i.e. both complementary nucleic acids are in solution. The hybridisation process can also occur with one of the complementary nucleic acids immobilised to a matrix such as magnetic beads, Sepharose beads or any other resin. The hybridisation process can furthermore occur with one of the complementary nucleic acids immobilised to a solid support such as a nitro-cellulose or nylon membrane or immobilised by e.g. photolithography to, for example, a siliceous glass support (the latter known as nucleic acid arrays or microarrays or as nucleic acid chips). In order to allow hybridisation to occur, the nucleic acid molecules are generally thermally or chemically denatured to melt a double strand into two single strands and/or to remove hairpins or other secondary structures from single stranded nucleic acids.

[0065] The term “stringency” refers to the conditions under which a hybridisation takes place. The stringency of hybridisation is influenced by conditions such as temperature, salt concentration, ionic strength and hybridisation buffer composition. Generally, low stringency conditions are selected to be about 30° C. lower than the thermal melting point (Tₘ) for the specific sequence at a defined ionic strength and pH. Medium stringency conditions are when the temperature is 20° C. below Tₘ, and high stringency conditions are when the temperature is 10° C. below Tₘ. High stringency hybridisation conditions are typically used for isolating hybridising sequences that have high sequence similarity to the target nucleic acid sequence. However, nucleic acids may deviate in sequence and still encode a substantially identical polypeptide, due to the degeneracy of the genetic code. Therefore medium stringency hybridisation conditions may sometimes be needed to identify such nucleic acid molecules.

[0066] The Tm is the temperature under defined ionic strength and pH, at which 50% of the target sequence hybridises to a perfectly matched probe. The Tₘ is dependent upon the solution conditions and the base composition and length of the probe. For example, longer sequences hybridise specifically at higher temperatures. The maximum rate of hybridisation is obtained from about 16° C. up to 32° C. below Tₘ. The presence of monovalent cations in the hybridisation solution reduce the electrostatic repulsion between the two nucleic acid strands thereby promoting hybrid formation; this effect is visible for sodium concentrations of up to 0.4M (for higher concentrations, this effect may be ignored). Formamide reduces the melting temperature of DNA-DNA and DNA-RNA duplexes with 0.6 to 0.7° C. for each percent formamide, and addition of 50% formamide allows hybridisation to be performed at 30 to 45° C., though the rate of hybridisation will be lowered. Base pair mismatches reduce the hybridisation rate and the thermal stability of the duplexes. On average and for large probes, the Tm decreases about 1° C. per % base mismatch. The Tm may be calculated using the following equations, depending on the types of hybrids:

1) DNA-DNA hybrids (Meinkoth and Wahl, Anal. Biochem., 138: 267-284, 1984):

Tₘ=81.5° C.+16.6×log₁₀[Na⁺]^{a}+0.41×%[G/C^{b}]−500×[L^{c}]⁻¹−0.61×% formamide

2) DNA-RNA or RNA-RNA hybrids:

Tₘ=79.8+18.5 (log₁₀[Na⁺]^{a})+0.58 (% G/C^{b})+11.8 (% G/C^{b})²−820/L^{c}

3) oligo-DNA or oligo-RNA^{d} hybrids:

For <20 nucleotides: Tₘ=2 (Iₙ)

For 20-35 nucleotides: Tₘ=22+1.46 (Iₙ)

^{a} or for other monovalent cation, but only accurate in the 0.01-0.4 M range.
^{b} only accurate for % GC in the 30% to 75% range.
^{c}L=length of duplex in base pairs.
^{d} oligo, oligonucleotide; Iₙ=effective length of primer=2×(no. of G/C)+(no. of A/T).

[0067] Non-specific binding may be controlled using any one of a number of known techniques such as, for example, blocking the membrane with protein containing solutions, additions of heterologous RNA, DNA, and SDS to the hybridisation buffer, and treatment with Rnase. For non-homologous probes, a series of hybridizations may be performed by varying one of (i) progressively lowering the annealing temperature (for example from 68° C. to 42° C.) or (ii) progressively lowering the formamide concentration (for example from 50% to 0%). The skilled artisan is aware of various parameters which may be altered during hybridisation and which will either maintain or change the stringency conditions.

[0068] Besides the hybridisation conditions, specificity of hybridisation typically also depends on the function of post-hybridisation washes. To remove background resulting from non-specific hybridisation, samples are washed with dilute salt solutions. Critical factors of such washes include the ionic strength and temperature of the final wash solution: the lower the salt concentration and the higher the wash temperature, the higher the stringency of the wash. Wash conditions are typically performed at or below hybridisation stringency. A positive hybridisation gives a signal that is at least twice of that of the background. Generally, suitable stringent conditions for nucleic acid hybridisation assays or gene amplification detection procedures are as set forth above. More or less stringent conditions may also be selected. The skilled artisan is aware of various parameters which may be altered during washing and which will either maintain or change the stringency conditions.

[0069] For example, typical high stringency hybridisation conditions for DNA hybrids longer than 50 nucleotides encompass hybridisation at 65° C. in 1×SSC or at 42° C. in 1×SSC and 50% formamide, followed by washing at 65° C. in 0.3×SSC. Examples of medium stringency hybridisation conditions for DNA hybrids longer than 50 nucleotides encompass hybridisation at 50° C. in 4×SSC or at 40° C. in 6×SSC and 50% formamide, followed by washing at 50° C. in 2×SSC. The length of the hybrid is the anticipated length for the hybridising nucleic acid. When nucleic acids of known sequence are hybridised, the hybrid length may be determined by aligning the sequences and identifying the conserved regions described herein. 1×SSC is 0.15M NaCl and 15 mM sodium citrate; the hybridisation solution and wash solutions may additionally include 5×Denhardt's reagent, 0.5-1.0% SDS, 100 μg/ml denatured, fragmented salmon sperm DNA, 0.5% sodium pyrophosphate.

[0070] For the purposes of defining the level of stringency, reference can be made to Sambrook et al. (2001) Molecular Cloning: a laboratory manual, 3^{rd} Edition, Cold Spring Harbor Laboratory Press, CSH, New York or to Current Protocols in Molecular Biology, John Wiley & Sons, N.Y. (1989 and yearly updates).

### Splice Variant

[0071] The term “splice variant” as used herein encompasses variants of a nucleic acid sequence in which selected introns and/or exons have been excised, replaced, displaced or added, or in which introns have been shortened or lengthened. Such variants will be ones in which the biological activity of the protein is substantially retained; this may be achieved by selectively retaining functional segments of the protein. Such splice variants may be found in nature or may be manmade. Methods for predicting and isolating such splice variants are well known in the art (see for example Foissac and Schiex (2005) BMC Bioinformatics 6: 25).

### Allelic Variant

[0072] Alleles or allelic variants are alternative forms of a given gene, located at the same chromosomal position. Allelic variants encompass Single Nucleotide Polymorphisms (SNPs), as well as Small Insertion/Deletion Polymorphisms (INDELs). The size of INDELs is usually less than 100 bp. SNPs and INDELs form the largest set of sequence variants in naturally occurring polymorphic strains of most organisms.

### Endogenous Gene

[0073] Reference herein to an “endogenous” gene not only refers to the gene in question as found in a plant in its natural form (i.e., without there being any human intervention), but also refers to that same gene (or a substantially homologous nucleic acid/gene) in an isolated form subsequently (re)introduced into a plant (a transgene). For example, a transgenic plant containing such a transgene may encounter a substantial reduction of the transgene expression and/or substantial reduction of expression of the endogenous gene. The isolated gene may be isolated from an organism or may be manmade, for example by chemical synthesis.

### Gene Shuffling/Directed Evolution

[0074] Gene shuffling or directed evolution consists of iterations of DNA shuffling followed by appropriate screening and/or selection to generate variants of nucleic acids or portions thereof encoding proteins having a modified biological activity (Castle et al., (2004) Science 304(5674): 1151-4; U.S. Pat. Nos. 5,811,238 and 6,395,547).

### Construct

[0075] Additional regulatory elements may include transcriptional as well as translational enhancers. Those skilled in the art will be aware of terminator and enhancer sequences that may be suitable for use in performing the invention. An intron sequence may also be added to the 5′untranslated region (UTR) or in the coding sequence to increase the amount of the mature message that accumulates in the cytosol, as described in the definitions section. Other control sequences (besides promoter, enhancer, silencer, intron sequences, 3′UTR and/or 5′UTR regions) may be protein and/or RNA stabilizing elements. Such sequences would be known or may readily be obtained by a person skilled in the art.

[0076] The genetic constructs of the invention may further include an origin of replication sequence that is required for maintenance and/or replication in a specific cell type. One example is when a genetic construct is required to be maintained in a bacterial cell as an episomal genetic element (e.g. plasmid or cosmid molecule). Preferred origins of replication include, but are not limited to, the f1-ori and colE1.

[0077] For the detection of the successful transfer of the nucleic acid sequences as used in the methods of the invention and/or selection of transgenic plants comprising these nucleic acids, it is advantageous to use marker genes (or reporter genes). Therefore, the genetic construct may optionally comprise a selectable marker gene. Selectable markers are described in more detail in the “definitions” section herein. The marker genes may be removed or excised from the transgenic cell once they are no longer needed. Techniques for marker removal are known in the art, useful techniques are described above in the definitions section.

### Regulatory Element/Control Sequence/Promoter

[0078] The terms “regulatory element”, “control sequence” and “promoter” are all used interchangeably herein and are to be taken in a broad context to refer to regulatory nucleic acid sequences capable of effecting expression of the sequences to which they are ligated. The term “promoter” typically refers to a nucleic acid control sequence located upstream from the transcriptional start of a gene and which is involved in recognising and binding of RNA polymerase and other proteins, thereby directing transcription of an operably linked nucleic acid. Encompassed by the aforementioned terms are transcriptional regulatory sequences derived from a classical eukaryotic genomic gene (including the TATA box which is required for accurate transcription initiation, with or without a CCAAT box sequence) and additional regulatory elements (i.e. upstream activating sequences, enhancers and silencers) which alter gene expression in response to developmental and/or external stimuli, or in a tissue-specific manner. Also included within the term is a transcriptional regulatory sequence of a classical prokaryotic gene, in which case it may include a −35 box sequence and/or −10 box transcriptional regulatory sequences. The term “regulatory element” also encompasses a synthetic fusion molecule or derivative that confers, activates or enhances expression of a nucleic acid molecule in a cell, tissue or organ.

[0079] A “plant promoter” comprises regulatory elements, which mediate the expression of a coding sequence segment in plant cells. Accordingly, a plant promoter need not be of plant origin, but may originate from viruses or micro-organisms, for example from viruses which attack plant cells. The “plant promoter” can also originate from a plant cell, e.g. from the plant which is transformed with the nucleic acid sequence to be expressed in the inventive process and described herein. This also applies to other “plant” regulatory signals, such as “plant” terminators. The promoters upstream of the nucleotide sequences useful in the methods of the present invention can be modified by one or more nucleotide substitution(s), insertion(s) and/or deletion(s) without interfering with the functionality or activity of either the promoters, the open reading frame (ORF) or the 3′-regulatory region such as terminators or other 3′regulatory regions which are located away from the ORF. It is furthermore possible that the activity of the promoters is increased by modification of their sequence, or that they are replaced completely by more active promoters, even promoters from heterologous organisms. For expression in plants, the nucleic acid molecule must, as described above, be linked operably to or comprise a suitable promoter which expresses the gene at the right point in time and with the required spatial expression pattern.

[0080] For the identification of functionally equivalent promoters, the promoter strength and/or expression pattern of a candidate promoter may be analysed for example by operably linking the promoter to a reporter gene and assaying the expression level and pattern of the reporter gene in various tissues of the plant. Suitable well-known reporter genes include for example beta-glucuronidase or beta-galactosidase. The promoter activity is assayed by measuring the enzymatic activity of the beta-glucuronidase or beta-galactosidase. The promoter strength and/or expression pattern may then be compared to that of a reference promoter (such as the one used in the methods of the present invention). Alternatively, promoter strength may be assayed by quantifying mRNA levels or by comparing mRNA levels of the nucleic acid used in the methods of the present invention, with mRNA levels of housekeeping genes such as 18S rRNA, using methods known in the art, such as Northern blotting with densitometric analysis of autoradiograms, quantitative real-time PCR or RT-PCR (Heid et al., 1996 Genome Methods 6: 986-994). Generally by “weak promoter” is intended a promoter that drives expression of a coding sequence at a low level. By “low level” is intended at levels of about 1/10,000 transcripts to about 1/100,000 transcripts, to about 1/500,0000 transcripts per cell. Conversely, a “strong promoter” drives expression of a coding sequence at high level, or at about 1/10 transcripts to about 1/100 transcripts to about 1/1000 transcripts per cell. Generally, by “medium strength promoter” is intended a promoter that drives expression of a coding sequence at a lower level than a strong promoter, in particular at a level that is in all instances below that obtained when under the control of a 35S CaMV promoter.

### Operably Linked

[0081] The term “operably linked” as used herein refers to a functional linkage between the promoter sequence and the gene of interest, such that the promoter sequence is able to initiate transcription of the gene of interest.

### Constitutive Promoter

[0082] A “constitutive promoter” refers to a promoter that is transcriptionally active during most, but not necessarily all, phases of growth and development and under most environmental conditions, in at least one cell, tissue or organ. Table 2a below gives examples of constitutive promoters.

TABLE 2a
Examples of constitutive promoters

| Gene Source | Reference |
|---|---|
| Actin | McElroy et al, Plant Cell, 2: 163-171, 1990 |
| HMGP | WO 2004/070039 |
| CAMV 35S | Odell et al, Nature, 313: 810-812, 1985 |
| CaMV 19S | Nilsson et al., Physiol. Plant. 100: 456-462, 1997 |
| GOS2 | de Pater et al, Plant J Nov; 2(6): 837-44, 1992, |
| | WO 2004/065596 |
| Ubiquitin | Christensen et al, Plant Mol. |
| | Biol. 18: 675-689, 1992 |
| Rice cyclophilin | Buchholz et al, Plant Mol Biol. 25(5): 837-43, 1994 |
| Maize H3 histone | Lepetit et al, Mol. Gen. Genet. 231: 276-285, 1992 |
| Alfalfa H3 histone | Wu et al. Plant Mol. Biol. 11: 641-649, 1988 |
| Actin 2 | An et al, Plant J. 10(1); 107-121, 1996 |
| 34S FMV | Sanger et al., Plant. Mol. Biol., 14, 1990: 433-443 |
| Rubisco small | U.S. Pat. No. 4,962,028 |
| subunit | |
| OCS | Leisner (1988) Proc Natl Acad Sci USA 85(5): 2553 |
| SAD1 | Jain et al., Crop Science, 39 (6), 1999: 1696 |
| SAD2 | Jain et al., Crop Science, 39 (6), 1999: 1696 |
| nos | Shaw et al. (1984) Nucleic Acids |
| | Res. 12(20): 7831-7846 |
| V-ATPase | WO 01/14572 |
| Super promoter | WO 95/14098 |
| G-box proteins | WO 94/12015 |

### Ubiquitous Promoter

[0083] A ubiquitous promoter is active in substantially all tissues or cells of an organism.

### Developmentally-Regulated Promoter

[0084] A developmentally-regulated promoter is active during certain developmental stages or in parts of the plant that undergo developmental changes.

### Inducible Promoter

[0085] An inducible promoter has induced or increased transcription initiation in response to a chemical (for a review see Gatz 1997, Annu. Rev. Plant Physiol. Plant Mol. Biol., 48:89-108), environmental or physical stimulus, or may be “stress-inducible”, i.e. activated when a plant is exposed to various stress conditions, or a “pathogen-inducible” i.e. activated when a plant is exposed to exposure to various pathogens.

### Organ-Specific/Tissue-Specific Promoter

[0086] An organ-specific or tissue-specific promoter is one that is capable of preferentially initiating transcription in certain organs or tissues, such as the leaves, roots, seed tissue etc. For example, a “root-specific promoter” is a promoter that is transcriptionally active predominantly in plant roots, substantially to the exclusion of any other parts of a plant, whilst still allowing for any leaky expression in these other plant parts. Promoters able to initiate transcription in certain cells only are referred to herein as “cell-specific”.

[0087] Examples of root-specific promoters are listed in Table 2b below:

TABLE 2b
Examples of root-specific promoters

| Gene Source | Reference |
|---|---|
| RCc3 | Plant Mol Biol. 1995 Jan; 27(2): 237-48 |
| Arabidopsis PHT1 | Kovama et al., 2005; Mudge et al. |
| | (2002, Plant J. 31: 341) |
| Medicago phosphate | Xiao et al., 2006 |
| transporter | |
| Arabidopsis Pyk10 | Nitz et al. (2001) Plant |
| | Sci 161(2): 337-346 |
| root-expressible genes | Tingey et al., EMBO J. 6: 1, 1987. |
| tobacco auxin-inducible gene | Van der Zaal et al., Plant Mol. |
| | Biol. 16, 983, 1991. |
| β-tubulin | Oppenheimer, et al., Gene 63: 87, 1988. |
| tobacco root-specific genes | Conkling, et al., Plant |
| | Physiol. 93: 1203, 1990. |
| B. napus G1-3b gene | U.S. Pat. No. 5,401,836 |
| SbPRP1 | Suzuki et al., Plant Mol. |
| | Biol. 21: 109-119, 1993. |
| LRX1 | Baumberger et al. 2001, Genes & |
| | Dev. 15: 1128 |
| BTG-26 Brassica napus | US 20050044585 |
| LeAMT1 (tomato) | Lauter et al. (1996, PNAS 3: 8139) |
| The LeNRT1-1 (tomato) | Lauter et al. (1996, PNAS 3: 8139) |
| class I patatin gene (potato) | Liu et al., Plant Mol. |
| | Biol. 153: 386-395, 1991. |
| KDC1 (Daucus carota) | Downey et al. (2000, J. Biol. |
| | Chem. 275: 39420) |
| TobRB7 gene | W Song (1997) PhD Thesis, North |
| | Carolina State University, |
| | Raleigh, NC USA |
| OsRAB5a (rice) | Wang et al. 2002, Plant Sci. 163: 273 |
| ALF5 (Arabidopsis) | Diener et al. (2001, Plant Cell 13: 1625) |
| NRT2; 1Np (N. plumbaginifolia) | Quesada et al. (1997, Plant Mol. |
| | Biol. 34: 265) |

[0088] A seed-specific promoter is transcriptionally active predominantly in seed tissue, but not necessarily exclusively in seed tissue (in cases of leaky expression). The seed-specific promoter may be active during seed development and/or during germination. The seed specific promoter may be endosperm/aleurone/embryo specific. Examples of seed-specific promoters (endosperm/aleurone/embryo specific) are shown in Table 2c to Table 2f below. Further examples of seed-specific promoters are given in Qing Qu and Takaiwa (Plant Biotechnol. J. 2, 113-125, 2004), which disclosure is incorporated by reference herein as if fully set forth.

TABLE 2c
Examples of seed-specific promoters

| Gene source | Reference |
|---|---|
| seed-specific genes | Simon et al., Plant Mol. Biol. 5: 191, 1985; |
| | Scofield et al., J. Biol. Chem. 262: 12202, 1987.; |
| | Baszczynski et al., Plant Mol. Biol. 14: 633, 1990. |
| Brazil Nut albumin | Pearson et al., Plant Mol. Biol. 18: 235-245, 1992. |
| legumin | Ellis et al., Plant Mol. Biol. 10: 203-214, 1988. |
| glutelin (rice) | Takaiwa et al., Mol. Gen. Genet. 208: 15-22, 1986; |
| | Takaiwa et al., FEBS Letts. 221: 43-47, 1987. |
| zein | Matzke et al Plant Mol Biol, 14(3): 323-32 1990 |
| napA | Stalberg et al, Planta 199: 515-519, 1996. |
| wheat LMW and HMW glutenin-1 | Mol Gen Genet 216: 81-90, 1989; NAR 17: 461-2, 1989 |
| wheat SPA | Albani et al, Plant Cell, 9: 171-184, 1997 |
| wheat α, β, γ-gliadins | EMBO J. 3: 1409-15, 1984 |
| barley ltr1 promoter | Diaz et al. (1995) Mol Gen Genet 248(5): 592-8 |
| barley B1, C, D, hordein | Theor Appl Gen 98: 1253-62, 1999; Plant J 4: 343-55, |
| | 1993; Mol Gen Genet 250: 750-60, 1996 |
| barley DOF | Mena et al, The Plant Journal, 116(1): 53-62, 1998 |
| blz2 | EP99106056.7 |
| synthetic promoter | Vicente-Carbajosa et al., Plant J. 13: 629-640, 1998. |
| rice prolamin NRP33 | Wu et al, Plant Cell Physiology 39(8) 885-889, 1998 |
| rice a-globulin Glb-1 | Wu et al, Plant Cell Physiology 39(8) 885-889, 1998 |
| rice OSH1 | Sato et al, Proc. Natl. Acad. Sci. USA, 93: 8117-8122, |
| | 1996 |
| rice α-globulin REB/OHP-1 | Nakase et al. Plant Mol. Biol. 33: 513-522, 1997 |
| rice ADP-glucose pyrophosphorylase | Trans Res 6: 157-68, 1997 |
| maize ESR gene family | Plant J 12: 235-46, 1997 |
| sorghum α-kafirin | DeRose et al., Plant Mol. Biol 32: 1029-35, 1996 |
| KNOX | Postma-Haarsma et al, Plant Mol. Biol. 39: 257-71, 1999 |
| rice oleosin | Wu et al, J. Biochem. 123: 386, 1998 |
| sunflower oleosin | Cummins et al., Plant Mol. Biol. 19: 873-876, 1992 |
| PRO0117, putative rice 40S | WO 2004/070039 |
| ribosomal protein | |
| PRO0136, rice alanine | unpublished |
| aminotransferase | |
| PRO0147, trypsin inhibitor ITR1 | unpublished |
| (barley) | |
| PRO0151, rice WSI18 | WO 2004/070039 |
| PRO0175, rice RAB21 | WO 2004/070039 |
| PRO005 | WO 2004/070039 |
| PRO0095 | WO 2004/070039 |
| α-amylase (Amy32b) | Lanahan et al, Plant Cell 4: 203-211, 1992; Skriver et al, |
| | Proc Natl Acad Sci USA 88: 7266-7270, 1991 |
| cathepsin β-like gene | Cejudo et al, Plant Mol Biol 20: 849-856, 1992 |
| Barley Ltp2 | Kalla et al., Plant J. 6: 849-60, 1994 |
| Chi26 | Leah et al., Plant J. 4: 579-89, 1994 |
| Maize B-Peru | Selinger et al., Genetics 149; 1125-38, 1998 |

TABLE 2d
examples of endosperm-specific promoters

| Gene source | Reference |
|---|---|
| glutelin (rice) | Takaiwa et al. (1986) Mol Gen Genet 208: 15-22; |
| | Takaiwa et al. (1987) FEBS Letts. 221: 43-47 |
| zein | Matzke et al., (1990) Plant Mol Biol 14(3): 323-32 |
| wheat LMW and | Colot et al. (1989) Mol Gen Genet 216: 81-90, |
| HMW glutenin-1 | Anderson et al. (1989) NAR 17: 461-2 |
| wheat SPA | Albani et al. (1997) Plant Cell 9: 171-184 |
| wheat gliadins | Rafalski et al. (1984) EMBO 3: 1409-15 |
| barley Itr1 promoter | Diaz et al. (1995) Mol Gen Genet 248(5): 592-8 |
| barley B1, C, | Cho et al. (1999) Theor Appl Genet 98: 1253-62; |
| D, hordein | Muller et al. (1993) Plant J 4: 343-55; |
| | Sorenson et al. (1996) Mol Gen Genet 250: 750-60 |
| barley DOF | Mena et al, (1998) Plant J 116(1): 53-62 |
| blz2 | Onate et al. (1999) J Biol Chem 274(14): 9175-82 |
| synthetic | Vicente-Carbajosa et al. (1998) Plant J 13: 629-640 |
| promoter | |
| rice prolamin | Wu et al, (1998) Plant Cell Physiol 39(8) 885-889 |
| NRP33 | |
| rice globulin Glb-1 | Wu et al. (1998) Plant Cell Physiol 39(8) 885-889 |
| rice globulin | Nakase et al. (1997) Plant Molec Biol 33: 513-522 |
| REB/OHP-1 | |
| rice ADP-glucose | Russell et al. (1997) Trans Res 6: 157-68 |
| pyrophosphorylase | |
| maize ESR | Opsahl-Ferstad et al. (1997) Plant J 12: 235-46 |
| gene family | |
| sorghum kafirin | DeRose et al. (1996) Plant Mol Biol 32: 1029-35 |

TABLE 2e
Examples of embryo specific promoters:

| Gene source | Reference |
|---|---|
| rice OSH1 | Sato et al, Proc. Natl. Acad. Sci. USA, 93: 8117-8122, |
| | 1996 |
| KNOX | Postma-Haarsma et al, Plant Mol. Biol. 39: 257-71, 1999 |
| PRO0151 | WO 2004/070039 |
| PRO0175 | WO 2004/070039 |
| PRO005 | WO 2004/070039 |
| PRO0095 | WO 2004/070039 |

TABLE 2f
Examples of aleurone-specific promoters:

| Gene source | Reference |
|---|---|
| α-amylase (Amy32b) | Lanahan et al, Plant Cell 4: 203-211, 1992; |
| | Skriver et al, Proc Natl Acad Sci |
| | USA 88: 7266-7270, 1991 |
| cathepsin β-like gene | Cejudo et al, Plant Mol Biol 20: 849-856, 1992 |
| Barley Ltp2 | Kalla et al., Plant J. 6: 849-60, 1994 |
| Chi26 | Leah et al., Plant J. 4: 579-89, 1994 |
| Maize B-Peru | Selinger et al., Genetics 149; 1125-38, 1998 |

[0089] A green tissue-specific promoter as defined herein is a promoter that is transcriptionally active predominantly in green tissue, substantially to the exclusion of any other parts of a plant, whilst still allowing for any leaky expression in these other plant parts.

[0090] Examples of green tissue-specific promoters which may be used to perform the methods of the invention are shown in Table 2g below.

TABLE 2g
Examples of green tissue-specific promoters

| Gene | Expression | Reference |
|---|---|---|
| Maize Orthophosphate dikinase | Leaf specific | Fukavama et al., 2001 |
| Maize Phosphoenolpyruvate | Leaf specific | Kausch et al., 2001 |
| carboxylase | | |
| Rice Phosphoenolpyruvate | Leaf specific | Liu et al., 2003 |
| carboxylase | | |
| Rice small subunit Rubisco | Leaf specific | Nomura et al., 2000 |
| rice beta expansin EXBP9 | Shoot specific | WO 2004/070039 |
| Pigeonpea small subunit Rubisco | Leaf specific | Panguluri et al., 2005 |
| Pea RBCS3A | Leaf specific | |

[0091] Another example of a tissue-specific promoter is a meristem-specific promoter, which is transcriptionally active predominantly in meristematic tissue, substantially to the exclusion of any other parts of a plant, whilst still allowing for any leaky expression in these other plant parts. Examples of green meristem-specific promoters which may be used to perform the methods of the invention are shown in Table 2h below.

TABLE 2h
Examples of meristem-specific promoters

| Gene source | Expression pattern | Reference |
|---|---|---|
| rice OSH1 | Shoot apical meristem, | Sato et al. (1996) |
| | from embryo globular stage | Proc. Natl. Acad. |
| | to seedling stage | Sci. USA, |
| | | 93: 8117-8122 |
| Rice metallothionein | Meristem specific | BAD87835.1 |
| WAK1 & WAK 2 | Shoot and root apical | Wagner & Kohorn |
| | meristems, and in | (2001) Plant Cell |
| | expanding leaves and | 13(2): 303-318 |
| | sepals | |

### Terminator

[0092] The term “terminator” encompasses a control sequence which is a DNA sequence at the end of a transcriptional unit which signals 3′ processing and polyadenylation of a primary transcript and termination of transcription. The terminator can be derived from the natural gene, from a variety of other plant genes, or from T-DNA. The terminator to be added may be derived from, for example, the nopaline synthase or octopine synthase genes, or alternatively from another plant gene, or less preferably from any other eukaryotic gene.

### Selectable Marker (Gene)/Reporter Gene

[0093] “Selectable marker”, “selectable marker gene” or “reporter gene” includes any gene that confers a phenotype on a cell in which it is expressed to facilitate the identification and/or selection of cells that are transfected or transformed with a nucleic acid construct of the invention. These marker genes enable the identification of a successful transfer of the nucleic acid molecules via a series of different principles. Suitable markers may be selected from markers that confer antibiotic or herbicide resistance, that introduce a new metabolic trait or that allow visual selection. Examples of selectable marker genes include genes conferring resistance to antibiotics (such as nptII that phosphorylates neomycin and kanamycin, or hpt, phosphorylating hygromycin, or genes conferring resistance to, for example, bleomycin, streptomycin, tetracyclin, chloramphenicol, ampicillin, gentamycin, geneticin (G418), spectinomycin or blasticidin), to herbicides (for example bar which provides resistance to Basta®; aroA or gox providing resistance against glyphosate, or the genes conferring resistance to, for example, imidazolinone, phosphinothricin or sulfonylurea), or genes that provide a metabolic trait (such as manA that allows plants to use mannose as sole carbon source or xylose isomerase for the utilisation of xylose, or antinutritive markers such as the resistance to 2-deoxyglucose). Expression of visual marker genes results in the formation of colour (for example β-glucuronidase, GUS or β-galactosidase with its coloured substrates, for example X-Gal), luminescence (such as the luciferin/luceferase system) or fluorescence (Green Fluorescent Protein, GFP, and derivatives thereof). This list represents only a small number of possible markers. The skilled worker is familiar with such markers. Different markers are preferred, depending on the organism and the selection method.

[0094] It is known that upon stable or transient integration of nucleic acids into plant cells, only a minority of the cells takes up the foreign DNA and, if desired, integrates it into its genome, depending on the expression vector used and the transfection technique used. To identify and select these integrants, a gene coding for a selectable marker (such as the ones described above) is usually introduced into the host cells together with the gene of interest. These markers can for example be used in mutants in which these genes are not functional by, for example, deletion by conventional methods. Furthermore, nucleic acid molecules encoding a selectable marker can be introduced into a host cell on the same vector that comprises the sequence encoding the polypeptides of the invention or used in the methods of the invention, or else in a separate vector. Cells which have been stably transfected with the introduced nucleic acid can be identified for example by selection (for example, cells which have integrated the selectable marker survive whereas the other cells die).

[0095] Since the marker genes, particularly genes for resistance to antibiotics and herbicides, are no longer required or are undesired in the transgenic host cell once the nucleic acids have been introduced successfully, the process according to the invention for introducing the nucleic acids advantageously employs techniques which enable the removal or excision of these marker genes. One such a method is what is known as co-transformation. The co-transformation method employs two vectors simultaneously for the transformation, one vector bearing the nucleic acid according to the invention and a second bearing the marker gene(s). A large proportion of transformants receives or, in the case of plants, comprises (up to 40% or more of the transformants), both vectors. In case of transformation with Agrobacteria, the transformants usually receive only a part of the vector, i.e. the sequence flanked by the T-DNA, which usually represents the expression cassette. The marker genes can subsequently be removed from the transformed plant by performing crosses. In another method, marker genes integrated into a transposon are used for the transformation together with desired nucleic acid (known as the Ac/Ds technology). The transformants can be crossed with a transposase source or the transformants are transformed with a nucleic acid construct conferring expression of a transposase, transiently or stable. In some cases (approx. 10%), the transposon jumps out of the genome of the host cell once transformation has taken place successfully and is lost. In a further number of cases, the transposon jumps to a different location. In these cases the marker gene must be eliminated by performing crosses. In microbiology, techniques were developed which make possible, or facilitate, the detection of such events. A further advantageous method relies on what is known as recombination systems; whose advantage is that elimination by crossing can be dispensed with. The best-known system of this type is what is known as the Cre/lox system. Cre1 is a recombinase that removes the sequences located between the loxP sequences. If the marker gene is integrated between the loxP sequences, it is removed once transformation has taken place successfully, by expression of the recombinase. Further recombination systems are the HIN/HIX, FLP/FRT and REP/STB system (Tribble et al., J. Biol. Chem., 275, 2000: 22255-22267; Velmurugan et al., J. Cell Biol., 149, 2000: 553-566). A site-specific integration into the plant genome of the nucleic acid sequences according to the invention is possible. Naturally, these methods can also be applied to microorganisms such as yeast, fungi or bacteria.

### Transgenic/Transgene/Recombinant

[0096] For the purposes of the invention, “transgenic”, “transgene” or “recombinant” means with regard to, for example, a nucleic acid sequence, an expression cassette, gene construct or a vector comprising the nucleic acid sequence or an organism transformed with the nucleic acid sequences, expression cassettes or vectors according to the invention, all those constructions brought about by recombinant methods in which either
[0097] (a) the nucleic acid sequences encoding proteins useful in the methods of the invention, or
[0098] (b) genetic control sequence(s) which is operably linked with the nucleic acid sequence according to the invention, for example a promoter, or
[0099] (c) a) and b)
   are not located in their natural genetic environment or have been modified by recombinant methods, it being possible for the modification to take the form of, for example, a substitution, addition, deletion, inversion or insertion of one or more nucleotide residues. The natural genetic environment is understood as meaning the natural genomic or chromosomal locus in the original plant or the presence in a genomic library. In the case of a genomic library, the natural genetic environment of the nucleic acid sequence is preferably retained, at least in part. The environment flanks the nucleic acid sequence at least on one side and has a sequence length of at least 50 bp, preferably at least 500 bp, especially preferably at least 1000 bp, most preferably at least 5000 bp. A naturally occurring expression cassette—for example the naturally occurring combination of the natural promoter of the nucleic acid sequences with the corresponding nucleic acid sequence encoding a polypeptide useful in the methods of the present invention, as defined above—becomes a transgenic expression cassette when this expression cassette is modified by non-natural, synthetic (“artificial”) methods such as, for example, mutagenic treatment. Suitable methods are described, for example, in U.S. Pat. No. 5,565,350 or WO 00/15815.

[0100] A transgenic plant for the purposes of the invention is thus understood as meaning, as above, that the nucleic acids used in the method of the invention are not at their natural locus in the genome of said plant, it being possible for the nucleic acids to be expressed homologously or heterologously. However, as mentioned, transgenic also means that, while the nucleic acids according to the invention or used in the inventive method are at their natural position in the genome of a plant, the sequence has been modified with regard to the natural sequence, and/or that the regulatory sequences of the natural sequences have been modified. Transgenic is preferably understood as meaning the expression of the nucleic acids according to the invention at an unnatural locus in the genome, i.e. homologous or, preferably, heterologous expression of the nucleic acids takes place. Preferred transgenic plants are mentioned herein.

### Modulation

[0101] The term “modulation” means in relation to expression or gene expression, a process in which the expression level is changed by said gene expression in comparison to the control plant, the expression level may be increased or decreased. The original, unmodulated expression may be of any kind of expression of a structural RNA (rRNA, tRNA) or mRNA with subsequent translation. The term “modulating the activity” shall mean any change of the expression of the inventive nucleic acid sequences or encoded proteins, which leads to increased yield and/or increased growth of the plants.

### Expression

[0102] The term “expression” or “gene expression” means the transcription of a specific gene or specific genes or specific genetic construct. The term “expression” or “gene expression” in particular means the transcription of a gene or genes or genetic construct into structural RNA (rRNA, tRNA) or mRNA with or without subsequent translation of the latter into a protein. The process includes transcription of DNA and processing of the resulting mRNA product.

### Increased Expression/Overexpression

[0103] The term “increased expression” or “overexpression” as used herein means any form of expression that is additional to the original wild-type expression level.

[0104] Methods for increasing expression of genes or gene products are well documented in the art and include, for example, overexpression driven by appropriate promoters, the use of transcription enhancers or translation enhancers. Isolated nucleic acids which serve as promoter or enhancer elements may be introduced in an appropriate position (typically upstream) of a non-heterologous form of a polynucleotide so as to upregulate expression of a nucleic acid encoding the polypeptide of interest. For example, endogenous promoters may be altered in vivo by mutation, deletion, and/or substitution (see, Kmiec, U.S. Pat. No. 5,565,350; Zarling et al., WO9322443), or isolated promoters may be introduced into a plant cell in the proper orientation and distance from a gene of the present invention so as to control the expression of the gene.

[0105] If polypeptide expression is desired, it is generally desirable to include a polyadenylation region at the 3′-end of a polynucleotide coding region. The polyadenylation region can be derived from the natural gene, from a variety of other plant genes, or from T-DNA. The 3′ end sequence to be added may be derived from, for example, the nopaline synthase or octopine synthase genes, or alternatively from another plant gene, or less preferably from any other eukaryotic gene.

[0106] An intron sequence may also be added to the 5′ untranslated region (UTR) or the coding sequence of the partial coding sequence to increase the amount of the mature message that accumulates in the cytosol. Inclusion of a spliceable intron in the transcription unit in both plant and animal expression constructs has been shown to increase gene expression at both the mRNA and protein levels up to 1000-fold (Buchman and Berg (1988) Mol. Cell. biol. 8: 4395-4405; Callis et al. (1987) Genes Dev 1:1183-1200). Such intron enhancement of gene expression is typically greatest when placed near the 5′ end of the transcription unit. Use of the maize introns Adh1-S intron 1, 2, and 6, the Bronze-1 intron are known in the art. For general information see: The Maize Handbook, Chapter 116, Freeling and Walbot, Eds., Springer, N.Y. (1994).

### Decreased Expression

[0107] Reference herein to “decreased expression” or “reduction or substantial elimination” of expression is taken to mean a decrease in endogenous gene expression and/or polypeptide levels and/or polypeptide activity relative to control plants. The reduction or substantial elimination is in increasing order of preference at least 10%, 20%, 30%, 40% or 50%, 60%, 70%, 80%, 85%, 90%, or 95%, 96%, 97%, 98%, 99% or more reduced compared to that of control plants.

[0108] For the reduction or substantial elimination of expression an endogenous gene in a plant, a sufficient length of substantially contiguous nucleotides of a nucleic acid sequence is required. In order to perform gene silencing, this may be as little as 20, 19, 18, 17, 16, 15, 14, 13, 12, 11, 10 or fewer nucleotides, alternatively this may be as much as the entire gene (including the 5′ and/or 3′ UTR, either in part or in whole). The stretch of substantially contiguous nucleotides may be derived from the nucleic acid encoding the protein of interest (target gene), or from any nucleic acid capable of encoding an orthologue, paralogue or homologue of the protein of interest. Preferably, the stretch of substantially contiguous nucleotides is capable of forming hydrogen bonds with the target gene (either sense or antisense strand), more preferably, the stretch of substantially contiguous nucleotides has, in increasing order of preference, 50%, 60%, 70%, 80%, 85%, 90%, 95%, 96%, 97%, 98%, 99%, 100% sequence identity to the target gene (either sense or antisense strand). A nucleic acid sequence encoding a (functional) polypeptide is not a requirement for the various methods discussed herein for the reduction or substantial elimination of expression of an endogenous gene.

[0109] This reduction or substantial elimination of expression may be achieved using routine tools and techniques. A preferred method for the reduction or substantial elimination of endogenous gene expression is by introducing and expressing in a plant a genetic construct into which the nucleic acid (in this case a stretch of substantially contiguous nucleotides derived from the gene of interest, or from any nucleic acid capable of encoding an orthologue, paralogue or homologue of any one of the protein of interest) is cloned as an inverted repeat (in part or completely), separated by a spacer (non-coding DNA).

[0110] In such a preferred method, expression of the endogenous gene is reduced or substantially eliminated through RNA-mediated silencing using an inverted repeat of a nucleic acid or a part thereof (in this case a stretch of substantially contiguous nucleotides derived from the gene of interest, or from any nucleic acid capable of encoding an orthologue, paralogue or homologue of the protein of interest), preferably capable of forming a hairpin structure. The inverted repeat is cloned in an expression vector comprising control sequences. A non-coding DNA nucleic acid sequence (a spacer, for example a matrix attachment region fragment (MAR), an intron, a polylinker, etc.) is located between the two inverted nucleic acids forming the inverted repeat. After transcription of the inverted repeat, a chimeric RNA with a self-complementary structure is formed (partial or complete). This double-stranded RNA structure is referred to as the hairpin RNA (hpRNA). The hpRNA is processed by the plant into siRNAs that are incorporated into an RNA-induced silencing complex (RISC). The RISC further cleaves the mRNA transcripts, thereby substantially reducing the number of mRNA transcripts to be translated into polypeptides. For further general details see for example, Grierson et al, (1998) WO 98/53083; Waterhouse et al. (1999) WO 99/53050).

[0111] Performance of the methods of the invention does not rely on introducing and expressing in a plant a genetic construct into which the nucleic acid is cloned as an inverted repeat, but any one or more of several well-known “gene silencing” methods may be used to achieve the same effects.

[0112] One such method for the reduction of endogenous gene expression is RNA-mediated silencing of gene expression (downregulation). Silencing in this case is triggered in a plant by a double stranded RNA sequence (dsRNA) that is substantially similar to the target endogenous gene. This dsRNA is further processed by the plant into about 20 to about 26 nucleotides called short interfering RNAs (siRNAs). The siRNAs are incorporated into an RNA-induced silencing complex (RISC) that cleaves the mRNA transcript of the endogenous target gene, thereby substantially reducing the number of mRNA transcripts to be translated into a polypeptide. Preferably, the double stranded RNA sequence corresponds to a target gene.

[0113] Another example of an RNA silencing method involves the introduction of nucleic acid sequences or parts thereof (in this case a stretch of substantially contiguous nucleotides derived from the gene of interest, or from any nucleic acid capable of encoding an orthologue, paralogue or homologue of the protein of interest) in a sense orientation into a plant. “Sense orientation” refers to a DNA sequence that is homologous to an mRNA transcript thereof. Introduced into a plant would therefore be at least one copy of the nucleic acid sequence. The additional nucleic acid sequence will reduce expression of the endogenous gene, giving rise to a phenomenon known as co-suppression. The reduction of gene expression will be more pronounced if several additional copies of a nucleic acid sequence are introduced into the plant, as there is a positive correlation between high transcript levels and the triggering of co-suppression.

[0114] Another example of an RNA silencing method involves the use of antisense nucleic acid sequences. An “antisense” nucleic acid sequence comprises a nucleotide sequence that is complementary to a “sense” nucleic acid sequence encoding a protein, i.e. complementary to the coding strand of a double-stranded cDNA molecule or complementary to an mRNA transcript sequence. The antisense nucleic acid sequence is preferably complementary to the endogenous gene to be silenced. The complementarity may be located in the “coding region” and/or in the “non-coding region” of a gene. The term “coding region” refers to a region of the nucleotide sequence comprising codons that are translated into amino acid residues. The term “non-coding region” refers to 5′ and 3′ sequences that flank the coding region that are transcribed but not translated into amino acids (also referred to as 5′ and 3′ untranslated regions).

[0115] Antisense nucleic acid sequences can be designed according to the rules of Watson and Crick base pairing. The antisense nucleic acid sequence may be complementary to the entire nucleic acid sequence (in this case a stretch of substantially contiguous nucleotides derived from the gene of interest, or from any nucleic acid capable of encoding an orthologue, paralogue or homologue of the protein of interest), but may also be an oligonucleotide that is antisense to only a part of the nucleic acid sequence (including the mRNA 5′ and 3′ UTR). For example, the antisense oligonucleotide sequence may be complementary to the region surrounding the translation start site of an mRNA transcript encoding a polypeptide. The length of a suitable antisense oligonucleotide sequence is known in the art and may start from about 50, 45, 40, 35, 30, 25, 20, 15 or 10 nucleotides in length or less. An antisense nucleic acid sequence according to the invention may be constructed using chemical synthesis and enzymatic ligation reactions using methods known in the art. For example, an antisense nucleic acid sequence (e.g., an antisense oligonucleotide sequence) may be chemically synthesized using naturally occurring nucleotides or variously modified nucleotides designed to increase the biological stability of the molecules or to increase the physical stability of the duplex formed between the antisense and sense nucleic acid sequences, e.g., phosphorothioate derivatives and acridine substituted nucleotides may be used. Examples of modified nucleotides that may be used to generate the antisense nucleic acid sequences are well known in the art. Known nucleotide modifications include methylation, cyclization and ‘caps’ and substitution of one or more of the naturally occurring nucleotides with an analogue such as inosine. Other modifications of nucleotides are well known in the art.

[0116] The antisense nucleic acid sequence can be produced biologically using an expression vector into which a nucleic acid sequence has been subcloned in an antisense orientation (i.e., RNA transcribed from the inserted nucleic acid will be of an antisense orientation to a target nucleic acid of interest). Preferably, production of antisense nucleic acid sequences in plants occurs by means of a stably integrated nucleic acid construct comprising a promoter, an operably linked antisense oligonucleotide, and a terminator.

[0117] The nucleic acid molecules used for silencing in the methods of the invention (whether introduced into a plant or generated in situ) hybridize with or bind to mRNA transcripts and/or genomic DNA encoding a polypeptide to thereby inhibit expression of the protein, e.g., by inhibiting transcription and/or translation. The hybridization can be by conventional nucleotide complementarity to form a stable duplex, or, for example, in the case of an antisense nucleic acid sequence which binds to DNA duplexes, through specific interactions in the major groove of the double helix. Antisense nucleic acid sequences may be introduced into a plant by transformation or direct injection at a specific tissue site. Alternatively, antisense nucleic acid sequences can be modified to target selected cells and then administered systemically. For example, for systemic administration, antisense nucleic acid sequences can be modified such that they specifically bind to receptors or antigens expressed on a selected cell surface, e.g., by linking the antisense nucleic acid sequence to peptides or antibodies which bind to cell surface receptors or antigens. The antisense nucleic acid sequences can also be delivered to cells using the vectors described herein.

[0118] According to a further aspect, the antisense nucleic acid sequence is an a-anomeric nucleic acid sequence. An a-anomeric nucleic acid sequence forms specific double-stranded hybrids with complementary RNA in which, contrary to the usual b-units, the strands run parallel to each other (Gaultier et al. (1987) Nucl Ac Res 15: 6625-6641). The antisense nucleic acid sequence may also comprise a 2′-o-methylribonucleotide (Inoue et al. (1987) Nucl Ac Res 15, 6131-6148) or a chimeric RNA-DNA analogue (Inoue et al. (1987) FEBS Lett. 215, 327-330).

[0119] The reduction or substantial elimination of endogenous gene expression may also be performed using ribozymes. Ribozymes are catalytic RNA molecules with ribonuclease activity that are capable of cleaving a single-stranded nucleic acid sequence, such as an mRNA, to which they have a complementary region. Thus, ribozymes (e.g., hammerhead ribozymes (described in Haselhoff and Gerlach (1988) Nature 334, 585-591) can be used to catalytically cleave mRNA transcripts encoding a polypeptide, thereby substantially reducing the number of mRNA transcripts to be translated into a polypeptide. A ribozyme having specificity for a nucleic acid sequence can be designed (see for example: Cech et al. U.S. Pat. No. 4,987,071; and Cech et al. U.S. Pat. No. 5,116,742). Alternatively, mRNA transcripts corresponding to a nucleic acid sequence can be used to select a catalytic RNA having a specific ribonuclease activity from a pool of RNA molecules (Bartel and Szostak (1993) Science 261, 1411-1418). The use of ribozymes for gene silencing in plants is known in the art (e.g., Atkins et al. (1994) WO 94/00012; Lenne et al. (1995) WO 95/03404; Lutziger et al. (2000) WO 00/00619; Prinsen et al. (1997) WO 97/13865 and Scott et al. (1997) WO 97/38116).

[0120] Gene silencing may also be achieved by insertion mutagenesis (for example, T-DNA insertion or transposon insertion) or by strategies as described by, among others, Angell and Baulcombe ((1999) Plant J 20(3): 357-62), (Amplicon VIGS WO 98/36083), or Baulcombe (WO 99/15682).

[0121] Gene silencing may also occur if there is a mutation on an endogenous gene and/or a mutation on an isolated gene/nucleic acid subsequently introduced into a plant. The reduction or substantial elimination may be caused by a non-functional polypeptide. For example, the polypeptide may bind to various interacting proteins; one or more mutation(s) and/or truncation(s) may therefore provide for a polypeptide that is still able to bind interacting proteins (such as receptor proteins) but that cannot exhibit its normal function (such as signalling ligand).

[0122] A further approach to gene silencing is by targeting nucleic acid sequences complementary to the regulatory region of the gene (e.g., the promoter and/or enhancers) to form triple helical structures that prevent transcription of the gene in target cells. See Helene, C., Anticancer Drug Res. 6, 569-84, 1991; Helene et al., Ann. N.Y. Acad. Sci. 660, 27-36 1992; and Maher, L. J. Bioassays 14, 807-15, 1992.

[0123] Other methods, such as the use of antibodies directed to an endogenous polypeptide for inhibiting its function in planta, or interference in the signalling pathway in which a polypeptide is involved, will be well known to the skilled man. In particular, it can be envisaged that manmade molecules may be useful for inhibiting the biological function of a target polypeptide, or for interfering with the signalling pathway in which the target polypeptide is involved.

[0124] Alternatively, a screening program may be set up to identify in a plant population natural variants of a gene, which variants encode polypeptides with reduced activity. Such natural variants may also be used for example, to perform homologous recombination.

[0125] Artificial and/or natural microRNAs (miRNAs) may be used to knock out gene expression and/or mRNA translation. Endogenous miRNAs are single stranded small RNAs of typically 19-24 nucleotides long. They function primarily to regulate gene expression and/or mRNA translation. Most plant microRNAs (miRNAs) have perfect or near-perfect complementarity with their target sequences. However, there are natural targets with up to five mismatches. They are processed from longer non-coding RNAs with characteristic fold-back structures by double-strand specific RNases of the Dicer family. Upon processing, they are incorporated in the RNA-induced silencing complex (RISC) by binding to its main component, an Argonaute protein. mRNAs serve as the specificity components of RISC, since they base-pair to target nucleic acids, mostly mRNAs, in the cytoplasm. Subsequent regulatory events include target mRNA cleavage and destruction and/or translational inhibition. Effects of miRNA overexpression are thus often reflected in decreased mRNA levels of target genes.

[0126] Artificial microRNAs (amiRNAs), which are typically 21 nucleotides in length, can be genetically engineered specifically to negatively regulate gene expression of single or multiple genes of interest. Determinants of plant microRNA target selection are well known in the art. Empirical parameters for target recognition have been defined and can be used to aid in the design of specific amiRNAs, (Schwab et al., Dev. Cell 8, 517-527, 2005). Convenient tools for design and generation of amiRNAs and their precursors are also available to the public (Schwab et al., Plant Cell 18, 1121-1133, 2006).

[0127] For optimal performance, the gene silencing techniques used for reducing expression in a plant of an endogenous gene requires the use of nucleic acid sequences from monocotyledonous plants for transformation of monocotyledonous plants, and from dicotyledonous plants for transformation of dicotyledonous plants. Preferably, a nucleic acid sequence from any given plant species is introduced into that same species. For example, a nucleic acid sequence from rice is transformed into a rice plant. However, it is not an absolute requirement that the nucleic acid sequence to be introduced originates from the same plant species as the plant in which it will be introduced. It is sufficient that there is substantial homology between the endogenous target gene and the nucleic acid to be introduced.

[0128] Described above are examples of various methods for the reduction or substantial elimination of expression in a plant of an endogenous gene. A person skilled in the art would readily be able to adapt the aforementioned methods for silencing so as to achieve reduction of expression of an endogenous gene in a whole plant or in parts thereof through the use of an appropriate promoter, for example.

### Transformation

[0129] The term “introduction” or “transformation” as referred to herein encompasses the transfer of an exogenous polynucleotide into a host cell, irrespective of the method used for transfer. Plant tissue capable of subsequent clonal propagation, whether by organogenesis or embryogenesis, may be transformed with a genetic construct of the present invention and a whole plant regenerated there from. The particular tissue chosen will vary depending on the clonal propagation systems available for, and best suited to, the particular species being transformed. Exemplary tissue targets include leaf disks, pollen, embryos, cotyledons, hypocotyls, megagametophytes, callus tissue, existing meristematic tissue (e.g., apical meristem, axillary buds, and root meristems), and induced meristem tissue (e.g., cotyledon meristem and hypocotyl meristem). The polynucleotide may be transiently or stably introduced into a host cell and may be maintained non-integrated, for example, as a plasmid. Alternatively, it may be integrated into the host genome. The resulting transformed plant cell may then be used to regenerate a transformed plant in a manner known to persons skilled in the art.

[0130] The transfer of foreign genes into the genome of a plant is called transformation. Transformation of plant species is now a fairly routine technique. Advantageously, any of several transformation methods may be used to introduce the gene of interest into a suitable ancestor cell. The methods described for the transformation and regeneration of plants from plant tissues or plant cells may be utilized for transient or for stable transformation. Transformation methods include the use of liposomes, electroporation, chemicals that increase free DNA uptake, injection of the DNA directly into the plant, particle gun bombardment, transformation using viruses or pollen and microprojection. Methods may be selected from the calcium/polyethylene glycol method for protoplasts (Krens, F. A. et al., (1982) Nature 296, 72-74; Negrutiu I et al. (1987) Plant Mol Biol 8: 363-373); electroporation of protoplasts (Shillito R. D. et al. (1985) Bio/Technol 3, 1099-1102); microinjection into plant material (Crossway A et al., (1986) Mol. Gen. Genet. 202: 179-185); DNA or RNA-coated particle bombardment (Klein T M et al., (1987) Nature 327: 70) infection with (non-integrative) viruses and the like. Transgenic plants, including transgenic crop plants, are preferably produced via Agrobacterium-mediated transformation. An advantageous transformation method is the transformation in planta. To this end, it is possible, for example, to allow the agrobacteria to act on plant seeds or to inoculate the plant meristem with agrobacteria. It has proved particularly expedient in accordance with the invention to allow a suspension of transformed agrobacteria to act on the intact plant or at least on the flower primordia. The plant is subsequently grown on until the seeds of the treated plant are obtained (Clough and Bent, Plant J. (1998) 16, 735-743). Methods for Agrobacterium-mediated transformation of rice include well known methods for rice transformation, such as those described in any of the following: European patent application EP 1198985 A1, Aldemita and Hodges (Planta 199: 612-617, 1996); Chan et al. (Plant Mol Biol 22 (3): 491-506, 1993), Hiei et al. (Plant J 6 (2): 271-282, 1994), which disclosures are incorporated by reference herein as if fully set forth. In the case of corn transformation, the preferred method is as described in either Ishida et al. (Nat. Biotechnol 14(6): 745-50, 1996) or Frame et al. (Plant Physiol 129(1): 13-22, 2002), which disclosures are incorporated by reference herein as if fully set forth. Said methods are further described by way of example in B. Jenes et al., Techniques for Gene Transfer, in: Transgenic Plants, Vol. 1, Engineering and Utilization, eds. S. D. Kung and R. Wu, Academic Press (1993) 128-143 and in Potrykus Annu. Rev. Plant Physiol. Plant Molec. Biol. 42 (1991) 205-225). The nucleic acids or the construct to be expressed is preferably cloned into a vector, which is suitable for transforming Agrobacterium tumefaciens, for example pBin19 (Bevan et al., Nucl. Acids Res. 12 (1984) 8711). Agrobacteria transformed by such a vector can then be used in known manner for the transformation of plants, such as plants used as a model, like Arabidopsis (Arabidopsis thaliana is within the scope of the present invention not considered as a crop plant), or crop plants such as, by way of example, tobacco plants, for example by immersing bruised leaves or chopped leaves in an agrobacterial solution and then culturing them in suitable media. The transformation of plants by means of Agrobacterium tumefaciens is described, for example, by Hofgen and Willmitzer in Nucl. Acid Res. (1988) 16, 9877 or is known inter alia from F. F. White, Vectors for Gene Transfer in Higher Plants; in Transgenic Plants, Vol. 1, Engineering and Utilization, eds. S. D. Kung and R. Wu, Academic Press, 1993, pp. 15-38.

[0131] In addition to the transformation of somatic cells, which then have to be regenerated into intact plants, it is also possible to transform the cells of plant meristems and in particular those cells which develop into gametes. In this case, the transformed gametes follow the natural plant development, giving rise to transgenic plants. Thus, for example, seeds of Arabidopsis are treated with agrobacteria and seeds are obtained from the developing plants of which a certain proportion is transformed and thus transgenic [Feldman, K A and Marks M D (1987). Mol Gen Genet. 208:274-289; Feldmann K (1992). In: C Koncz, N-H Chua and J Shell, eds, Methods in Arabidopsis Research. Word Scientific, Singapore, pp. 274-289]. Alternative methods are based on the repeated removal of the inflorescences and incubation of the excision site in the center of the rosette with transformed agrobacteria, whereby transformed seeds can likewise be obtained at a later point in time (Chang (1994). Plant J. 5: 551-558; Katavic (1994). Mol Gen Genet, 245: 363-370). However, an especially effective method is the vacuum infiltration method with its modifications such as the “floral dip” method. In the case of vacuum infiltration of Arabidopsis, intact plants under reduced pressure are treated with an agrobacterial suspension [Bechthold, N (1993). C R Acad Sci Paris Life Sci, 316: 1194-1199], while in the case of the “floral dip” method the developing floral tissue is incubated briefly with a surfactant-treated agrobacterial suspension [Clough, S J and Bent A F (1998) The Plant J. 16, 735-743]. A certain proportion of transgenic seeds are harvested in both cases, and these seeds can be distinguished from non-transgenic seeds by growing under the above-described selective conditions. In addition the stable transformation of plastids is of advantages because plastids are inherited maternally is most crops reducing or eliminating the risk of transgene flow through pollen. The transformation of the chloroplast genome is generally achieved by a process which has been schematically displayed in Klaus et al., 2004 [Nature Biotechnology 22 (2), 225-229]. Briefly the sequences to be transformed are cloned together with a selectable marker gene between flanking sequences homologous to the chloroplast genome. These homologous flanking sequences direct site specific integration into the plastome. Plastidal transformation has been described for many different plant species and an overview is given in Bock (2001) Transgenic plastids in basic research and plant biotechnology. J Mol Biol. 2001 Sep. 21; 312 (3):425-38 or Maliga, P (2003) Progress towards commercialization of plastid transformation technology. Trends Biotechnol. 21, 20-28. Further biotechnological progress has recently been reported in form of marker free plastid transformants, which can be produced by a transient co-integrated maker gene (Klaus et al., 2004, Nature Biotechnology 22(2), 225-229).

[0132] The genetically modified plant cells can be regenerated via all methods with which the skilled worker is familiar. Suitable methods can be found in the abovementioned publications by S. D. Kung and R. Wu, Potrykus or Höfgen and Willmitzer.

[0133] Generally after transformation, plant cells or cell groupings are selected for the presence of one or more markers which are encoded by plant-expressible genes co-transferred with the gene of interest, following which the transformed material is regenerated into a whole plant. To select transformed plants, the plant material obtained in the transformation is, as a rule, subjected to selective conditions so that transformed plants can be distinguished from untransformed plants. For example, the seeds obtained in the above-described manner can be planted and, after an initial growing period, subjected to a suitable selection by spraying. A further possibility consists in growing the seeds, if appropriate after sterilization, on agar plates using a suitable selection agent so that only the transformed seeds can grow into plants. Alternatively, the transformed plants are screened for the presence of a selectable marker such as the ones described above.

[0134] Following DNA transfer and regeneration, putatively transformed plants may also be evaluated, for instance using Southern analysis, for the presence of the gene of interest, copy number and/or genomic organisation. Alternatively or additionally, expression levels of the newly introduced DNA may be monitored using Northern and/or Western analysis, both techniques being well known to persons having ordinary skill in the art.

[0135] The generated transformed plants may be propagated by a variety of means, such as by clonal propagation or classical breeding techniques. For example, a first generation (or T1) transformed plant may be selfed and homozygous second-generation (or T2) transformants selected, and the T2 plants may then further be propagated through classical breeding techniques. The generated transformed organisms may take a variety of forms. For example, they may be chimeras of transformed cells and non-transformed cells; clonal transformants (e.g., all cells transformed to contain the expression cassette); grafts of transformed and untransformed tissues (e.g., in plants, a transformed rootstock grafted to an untransformed scion).

### T-DNA Activation Tagging

[0136] T-DNA activation tagging (Hayashi et al. Science (1992) 1350-1353), involves insertion of T-DNA, usually containing a promoter (may also be a translation enhancer or an intron), in the genomic region of the gene of interest or 10 kb up- or downstream of the coding region of a gene in a configuration such that the promoter directs expression of the targeted gene. Typically, regulation of expression of the targeted gene by its natural promoter is disrupted and the gene falls under the control of the newly introduced promoter. The promoter is typically embedded in a T-DNA. This T-DNA is randomly inserted into the plant genome, for example, through Agrobacterium infection and leads to modified expression of genes near the inserted T-DNA. The resulting transgenic plants show dominant phenotypes due to modified expression of genes close to the introduced promoter.

### TILLING

[0137] The term “TILLING” is an abbreviation of “Targeted Induced Local Lesions In Genomes” and refers to a mutagenesis technology useful to generate and/or identify nucleic acids encoding proteins with modified expression and/or activity. TILLING also allows selection of plants carrying such mutant variants. These mutant variants may exhibit modified expression, either in strength or in location or in timing (if the mutations affect the promoter for example). These mutant variants may exhibit higher activity than that exhibited by the gene in its natural form. TILLING combines high-density mutagenesis with high-throughput screening methods. The steps typically followed in TILLING are: (a) EMS mutagenesis (Redei G P and Koncz C (1992) In Methods in Arabidopsis Research, Koncz C, Chua N H, Schell J, eds. Singapore, World Scientific Publishing Co, pp. 16-82; Feldmann et al., (1994) In Meyerowitz E M, Somerville C R, eds, Arabidopsis. Cold Spring Harbor Laboratory Press, Cold Spring Harbor, N.Y., pp 137-172; Lightner J and Caspar T (1998) In J Martinez-Zapater, J Salinas, eds, Methods on Molecular Biology, Vol. 82. Humana Press, Totowa, N.J., pp 91-104); (b) DNA preparation and pooling of individuals; (c) PCR amplification of a region of interest; (d) denaturation and annealing to allow formation of heteroduplexes; (e) DHPLC, where the presence of a heteroduplex in a pool is detected as an extra peak in the chromatogram; (f) identification of the mutant individual; and (g) sequencing of the mutant PCR product. Methods for TILLING are well known in the art (McCallum et al., (2000) Nat Biotechnol 18: 455-457; reviewed by Stemple (2004) Nat Rev Genet. 5(2): 145-50).

### Homologous Recombination

[0138] Homologous recombination allows introduction in a genome of a selected nucleic acid at a defined selected position. Homologous recombination is a standard technology used routinely in biological sciences for lower organisms such as yeast or the moss Physcomitrella. Methods for performing homologous recombination in plants have been described not only for model plants (Offring a et al. (1990) EMBO J. 9(10): 3077-84) but also for crop plants, for example rice (Terada et al. (2002) Nat Biotech 20(10): 1030-4; lida and Terada (2004) Curr Opin Biotech 15(2): 132-8), and approaches exist that are generally applicable regardless of the target organism (Miller et al, Nature Biotechnol. 25, 778-785, 2007).

### Yield Related Traits

[0139] Yield related traits comprise one or more of yield, biomass, seed yield, early vigour, greenness index, increased growth rate, improved agronomic traits (such as improved Water Use Efficiency (WUE), Nitrogen Use Efficiency (NUE), etc.).

### Yield

[0140] The term “yield” in general means a measurable produce of economic value, typically related to a specified crop, to an area, and to a period of time. Individual plant parts directly contribute to yield based on their number, size and/or weight, or the actual yield is the yield per square meter for a crop and year, which is determined by dividing total production (includes both harvested and appraised production) by planted square meters. The term “yield” of a plant may relate to vegetative biomass (root and/or shoot biomass), to reproductive organs, and/or to propagules (such as seeds) of that plant.

[0141] Taking corn as an example, a yield increase may be manifested as one or more of the following: increase in the number of plants established per square meter, an increase in the number of ears per plant, an increase in the number of rows, number of kernels per row, kernel weight, thousand kernel weight, ear length/diameter, increase in the seed filling rate (which is the number of filled seeds divided by the total number of seeds and multiplied by 100), among others. Taking rice as an example, a yield increase may manifest itself as an increase in one or more of the following: number of plants per square meter, number of panicles per plant, panicle length, number of spikelets per panicle, number of flowers (florets) per panicle, increase in the seed filling rate (which is the number of filled seeds divided by the total number of seeds and multiplied by 100), increase in thousand kernel weight, among others. In rice, submergence tolerance may also result in increased yield.

### Early Vigour

[0142] “Early vigour” refers to active healthy well-balanced growth especially during early stages of plant growth, and may result from increased plant fitness due to, for example, the plants being better adapted to their environment (i.e. optimizing the use of energy resources and partitioning between shoot and root). Plants having early vigour also show increased seedling survival and a better establishment of the crop, which often results in highly uniform fields (with the crop growing in uniform manner, i.e. with the majority of plants reaching the various stages of development at substantially the same time), and often better and higher yield. Therefore, early vigour may be determined by measuring various factors, such as thousand kernel weight, percentage germination, percentage emergence, seedling growth, seedling height, root length, root and shoot biomass and many more.

### Increased Growth Rate

[0143] The increased growth rate may be specific to one or more parts of a plant (including seeds), or may be throughout substantially the whole plant. Plants having an increased growth rate may have a shorter life cycle. The life cycle of a plant may be taken to mean the time needed to grow from a dry mature seed up to the stage where the plant has produced dry mature seeds, similar to the starting material. This life cycle may be influenced by factors such as speed of germination, early vigour, growth rate, greenness index, flowering time and speed of seed maturation. The increase in growth rate may take place at one or more stages in the life cycle of a plant or during substantially the whole plant life cycle. Increased growth rate during the early stages in the life cycle of a plant may reflect enhanced vigour. The increase in growth rate may alter the harvest cycle of a plant allowing plants to be sown later and/or harvested sooner than would otherwise be possible (a similar effect may be obtained with earlier flowering time). If the growth rate is sufficiently increased, it may allow for the further sowing of seeds of the same plant species (for example sowing and harvesting of rice plants followed by sowing and harvesting of further rice plants all within one conventional growing period). Similarly, if the growth rate is sufficiently increased, it may allow for the further sowing of seeds of different plants species (for example the sowing and harvesting of corn plants followed by, for example, the sowing and optional harvesting of soybean, potato or any other suitable plant). Harvesting additional times from the same rootstock in the case of some crop plants may also be possible. Altering the harvest cycle of a plant may lead to an increase in annual biomass production per square meter (due to an increase in the number of times (say in a year) that any particular plant may be grown and harvested). An increase in growth rate may also allow for the cultivation of transgenic plants in a wider geographical area than their wild-type counterparts, since the territorial limitations for growing a crop are often determined by adverse environmental conditions either at the time of planting (early season) or at the time of harvesting (late season). Such adverse conditions may be avoided if the harvest cycle is shortened. The growth rate may be determined by deriving various parameters from growth curves, such parameters may be: T-Mid (the time taken for plants to reach 50% of their maximal size) and T-90 (time taken for plants to reach 90% of their maximal size), amongst others.

### Stress Resistance

[0144] An increase in yield and/or growth rate occurs whether the plant is under non-stress conditions or whether the plant is exposed to various stresses compared to control plants. Plants typically respond to exposure to stress by growing more slowly. In conditions of severe stress, the plant may even stop growing altogether. Mild stress on the other hand is defined herein as being any stress to which a plant is exposed which does not result in the plant ceasing to grow altogether without the capacity to resume growth. Mild stress in the sense of the invention leads to a reduction in the growth of the stressed plants of less than 40%, 35%, 30% or 25%, more preferably less than 20% or 15% in comparison to the control plant under non-stress conditions. Due to advances in agricultural practices (irrigation, fertilization, pesticide treatments) severe stresses are not often encountered in cultivated crop plants. As a consequence, the compromised growth induced by mild stress is often an undesirable feature for agriculture. Mild stresses are the everyday biotic and/or abiotic (environmental) stresses to which a plant is exposed. Abiotic stresses may be due to drought or excess water, anaerobic stress, salt stress, chemical toxicity, oxidative stress and hot, cold or freezing temperatures. The abiotic stress may be an osmotic stress caused by a water stress (particularly due to drought), salt stress, oxidative stress or an ionic stress. Biotic stresses are typically those stresses caused by pathogens, such as bacteria, viruses, fungi, nematodes and insects.

[0145] In particular, the methods of the present invention may be performed under non-stress conditions or under conditions of mild drought to give plants having increased yield relative to control plants. As reported in Wang et al. (Planta (2003) 218: 1-14), abiotic stress leads to a series of morphological, physiological, biochemical and molecular changes that adversely affect plant growth and productivity. Drought, salinity, extreme temperatures and oxidative stress are known to be interconnected and may induce growth and cellular damage through similar mechanisms. Rabbani et al. (Plant Physiol (2003) 133: 1755-1767) describes a particularly high degree of “cross talk” between drought stress and high-salinity stress. For example, drought and/or salinisation are manifested primarily as osmotic stress, resulting in the disruption of homeostasis and ion distribution in the cell. Oxidative stress, which frequently accompanies high or low temperature, salinity or drought stress, may cause denaturing of functional and structural proteins. As a consequence, these diverse environmental stresses often activate similar cell signalling pathways and cellular responses, such as the production of stress proteins, up-regulation of anti-oxidants, accumulation of compatible solutes and growth arrest. The term “non-stress” conditions as used herein are those environmental conditions that allow optimal growth of plants. Persons skilled in the art are aware of normal soil conditions and climatic conditions for a given location. Plants with optimal growth conditions, (grown under non-stress conditions) typically yield in increasing order of preference at least 97%, 95%, 92%, 90%, 87%, 85%, 83%, 80%, 77% or 75% of the average production of such plant in a given environment. Average production may be calculated on harvest and/or season basis. Persons skilled in the art are aware of average yield productions of a crop.

[0146] Nutrient deficiency may result from a lack of nutrients such as nitrogen, phosphates and other phosphorous-containing compounds, potassium, calcium, magnesium, manganese, iron and boron, amongst others.

[0147] The term salt stress is not restricted to common salt (NaCl), but may be any one or more of: NaCl, KCl, LiCl, MgCl₂, CaCl₂, amongst others.

### Increase/Improve/Enhance

[0148] The terms “increase”, “improve” or “enhance” are interchangeable and shall mean in the sense of the application at least a 3%, 4%, 5%, 6%, 7%, 8%, 9% or 10%, preferably at least 15% or 20%, more preferably 25%, 30%, 35% or 40% more yield and/or growth in comparison to control plants as defined herein.

### Seed Yield

[0149] Increased seed yield may manifest itself as one or more of the following: a) an increase in seed biomass (total seed weight) which may be on an individual seed basis and/or per plant and/or per square meter; b) increased number of flowers per plant; c) increased number of (filled) seeds; d) increased seed filling rate (which is expressed as the ratio between the number of filled seeds divided by the total number of seeds); e) increased harvest index, which is expressed as a ratio of the yield of harvestable parts, such as seeds, divided by the total biomass; and f) increased thousand kernel weight (TKW), which is extrapolated from the number of filled seeds counted and their total weight. An increased TKW may result from an increased seed size and/or seed weight, and may also result from an increase in embryo and/or endosperm size.

[0150] An increase in seed yield may also be manifested as an increase in seed size and/or seed volume. Furthermore, an increase in seed yield may also manifest itself as an increase in seed area and/or seed length and/or seed width and/or seed perimeter. Increased yield may also result in modified architecture, or may occur because of modified architecture.

### Greenness Index

[0151] The “greenness index” as used herein is calculated from digital images of plants. For each pixel belonging to the plant object on the image, the ratio of the green value versus the red value (in the RGB model for encoding color) is calculated. The greenness index is expressed as the percentage of pixels for which the green-to-red ratio exceeds a given threshold. Under normal growth conditions, under salt stress growth conditions, and under reduced nutrient availability growth conditions, the greenness index of plants is measured in the last imaging before flowering. In contrast, under drought stress growth conditions, the greenness index of plants is measured in the first imaging after drought.

### Marker Assisted Breeding

[0152] Such breeding programmes sometimes require introduction of allelic variation by mutagenic treatment of the plants, using for example EMS mutagenesis; alternatively, the programme may start with a collection of allelic variants of so called “natural” origin caused unintentionally. Identification of allelic variants then takes place, for example, by PCR. This is followed by a step for selection of superior allelic variants of the sequence in question and which give increased yield. Selection is typically carried out by monitoring growth performance of plants containing different allelic variants of the sequence in question. Growth performance may be monitored in a greenhouse or in the field. Further optional steps include crossing plants in which the superior allelic variant was identified with another plant. This could be used, for example, to make a combination of interesting phenotypic features.

### Use as Probes in (Gene Mapping)

[0153] Use of nucleic acids encoding the protein of interest for genetically and physically mapping the genes requires only a nucleic acid sequence of at least 15 nucleotides in length. These nucleic acids may be used as restriction fragment length polymorphism (RFLP) markers. Southern blots (Sambrook J, Fritsch E F and Maniatis T (1989) Molecular Cloning, A Laboratory Manual) of restriction-digested plant genomic DNA may be probed with the nucleic acids encoding the protein of interest. The resulting banding patterns may then be subjected to genetic analyses using computer programs such as MapMaker (Lander et al. (1987) Genomics 1: 174-181) in order to construct a genetic map. In addition, the nucleic acids may be used to probe Southern blots containing restriction endonuclease-treated genomic DNAs of a set of individuals representing parent and progeny of a defined genetic cross. Segregation of the DNA polymorphisms is noted and used to calculate the position of the nucleic acid encoding the protein of interest in the genetic map previously obtained using this population (Botstein et al. (1980) Am. J. Hum. Genet. 32:314-331).

[0154] The production and use of plant gene-derived probes for use in genetic mapping is described in Bernatzky and Tanksley (1986) Plant Mol. Biol. Reporter 4: 37-41. Numerous publications describe genetic mapping of specific cDNA clones using the methodology outlined above or variations thereof. For example, F2 intercross populations, backcross populations, randomly mated populations, near isogenic lines, and other sets of individuals may be used for mapping. Such methodologies are well known to those skilled in the art.

[0155] The nucleic acid probes may also be used for physical mapping (i.e., placement of sequences on physical maps; see Hoheisel et al. In: Non-mammalian Genomic Analysis: A Practical Guide, Academic press 1996, pp. 319-346, and references cited therein).

[0156] In another embodiment, the nucleic acid probes may be used in direct fluorescence in situ hybridisation (FISH) mapping (Trask (1991) Trends Genet. 7:149-154). Although current methods of FISH mapping favour use of large clones (several kb to several hundred kb; see Laan et al. (1995) Genome Res. 5:13-20), improvements in sensitivity may allow performance of FISH mapping using shorter probes.

[0157] A variety of nucleic acid amplification-based methods for genetic and physical mapping may be carried out using the nucleic acids. Examples include allele-specific amplification (Kazazian (1989) J. Lab. Clin. Med. 11:95-96), polymorphism of PCR-amplified fragments (CAPS; Sheffield et al. (1993) Genomics 16:325-332), allele-specific ligation (Landegren et al. (1988) Science 241:1077-1080), nucleotide extension reactions (Sokolov (1990) Nucleic Acid Res. 18:3671), Radiation Hybrid Mapping (Walter et al. (1997) Nat. Genet. 7:22-28) and Happy Mapping (Dear and Cook (1989) Nucleic Acid Res. 17:6795-6807). For these methods, the sequence of a nucleic acid is used to design and produce primer pairs for use in the amplification reaction or in primer extension reactions. The design of such primers is well known to those skilled in the art. In methods employing PCR-based genetic mapping, it may be necessary to identify DNA sequence differences between the parents of the mapping cross in the region corresponding to the instant nucleic acid sequence. This, however, is generally not necessary for mapping methods.

### Plant

[0158] The term “plant” as used herein encompasses whole plants, ancestors and progeny of the plants and plant parts, including seeds, shoots, stems, leaves, roots (including tubers), flowers, and tissues and organs, wherein each of the aforementioned comprise the gene/nucleic acid of interest. The term “plant” also encompasses plant cells, suspension cultures, callus tissue, embryos, meristematic regions, gametophytes, sporophytes, pollen and microspores, again wherein each of the aforementioned comprises the gene/nucleic acid of interest.

[0159] Plants that are particularly useful in the methods of the invention include all plants which belong to the superfamily Viridiplantae, in particular monocotyledonous and dicotyledonous plants including fodder or forage legumes, ornamental plants, food crops, trees or shrubs selected from the list comprising Acer spp., Actinidia spp., Abelmoschus spp., Agave sisalana, Agropyron spp., Agrostis stolonifera, Allium spp., Amaranthus spp., Ammophila arenaria, Ananas comosus, Annona spp., Apium graveolens, Arachis spp, Artocarpus spp., Asparagus officinalis, Avena spp. (e.g. Avena sativa, Avena fatua, Avena byzantina, Avena fatua var. sativa, Avena hybrida), Averrhoa carambola, Bambusa sp., Benincasa hispida, Bertholletia excelsea, Beta vulgaris, Brassica spp. (e.g. Brassica napus, Brassica rapa ssp. [canola, oilseed rape, turnip rape]), Cadaba farinosa, Camellia sinensis, Canna indica, Cannabis sativa, Capsicum spp., Carex elata, Carica papaya, Carissa macrocarpa, Carya spp., Carthamus tinctorius, Castanea spp., Ceiba pentandra, Cichorium endivia, Cinnamomum spp., Citrullus lanatus, Citrus spp., Cocos spp., Coffea spp., Colocasia esculenta, Cola spp., Corchorus sp., Coriandrum sativum, Corylus spp., Crataegus spp., Crocus sativus, Cucurbita spp., Cucumis spp., Cynara spp., Daucus carota, Desmodium spp., Dimocarpus longan, Dioscorea spp., Diospyros spp., Echinochloa spp., Elaeis (e.g. Elaeis guineensis, Elaeis oleifera), Eleusine coracana, Eragrostis tef, Erianthus sp., Eriobotrya japonica, Eucalyptus sp., Eugenia uniflora, Fagopyrum spp., Fagus spp., Festuca arundinacea, Ficus carica, Fortunella spp., Fragaria spp., Ginkgo biloba, Glycine spp. (e.g. Glycine max, Soja hispida or Soja max), Gossypium hirsutum, Helianthus spp. (e.g. Helianthus annuus), Hemerocaffis fulva, Hibiscus spp., Hordeum spp. (e.g. Hordeum vulgare), Ipomoea batatas, Juglans spp., Lactuca sativa, Lathyrus spp., Lens culinaris, Linum usitatissimum, Litchi chinensis, Lotus spp., Luffa acutangula, Lupinus spp., Luzula sylvatica, Lycopersicon spp. (e.g. Lycopersicon esculentum, Lycopersicon lycopersicum, Lycopersicon pyriforme), Macrotyloma spp., Malus spp., Malpighia emarginata, Mammea americana, Mangifera indica, Manihot spp., Manilkara zapota, Medicago sativa, Melilotus spp., Mentha spp., Miscanthus sinensis, Momordica spp., Morus nigra, Musa spp., Nicotiana spp., Olea spp., Opuntia spp., Ornithopus spp., Oryza spp. (e.g. Oryza sativa, Oryza latifolia), Panicum miliaceum, Panicum virgatum, Passiflora edulis, Pastinaca sativa, Pennisetum sp., Persea spp., Petroselinum crispum, Phalaris arundinacea, Phaseolus spp., Phleum pratense, Phoenix spp., Phragmites australis, Physalis spp., Pinus spp., Pistacia vera, Pisum spp., Poa spp., Populus spp., Prosopis spp., Prunus spp., Psidium spp., Punica granatum, Pyrus communis, Quercus spp., Raphanus sativus, Rheum rhabarbarum, Ribes spp., Ricinus communis, Rubus spp., Saccharum spp., Salix sp., Sambucus spp., Secale cereale, Sesamum spp., Sinapis sp., Solanum spp. (e.g. Solanum tuberosum, Solanum integrifolium or Solanum lycopersicum), Sorghum bicolor, Spinacia spp., Syzygium spp., Tagetes spp., Tamarindus indica, Theobroma cacao, Trifolium spp., Tripsacum dactyloides, Triticosecale rimpaui, Triticum spp. (e.g. Triticum aestivum, Triticum durum, Triticum turgidum, Triticum hybernum, Triticum macha, Triticum sativum, Triticum monococcum or Triticum vulgare), Tropaeolum minus, Tropaeolum majus, Vaccinium spp., Vicia spp., Vigna spp., Viola odorata, Vitis spp., Zea mays, Zizania palustris, Ziziphus spp., amongst others.

### Control Plant(s)

[0160] The choice of suitable control plants is a routine part of an experimental setup and may include corresponding wild type plants or corresponding plants without the gene of interest. The control plant is typically of the same plant species or even of the same variety as the plant to be assessed. The control plant may also be a nullizygote of the plant to be assessed. Nullizygotes are individuals missing the transgene by segregation. A “control plant” as used herein refers not only to whole plants, but also to plant parts, including seeds and seed parts.

### DETAILED DESCRIPTION OF THE INVENTION

[0161] Surprisingly, it has now been found that modulating expression in a plant of a nucleic acid encoding a C3H-like polypeptide gives plants having enhanced yield-related traits relative to control plants. According to a first embodiment, the present invention provides a method for enhancing yield-related traits in plants relative to control plants, comprising modulating expression in a plant of a nucleic acid encoding a C3H-like polypeptide and optionally selecting for plants having enhanced yield-related traits.

[0162] Furthermore, it has now surprisingly been found that modulating expression in a plant of a nucleic acid encoding an SPT-like polypeptide gives plants having enhanced yield-related traits relative to control plants. According to a first embodiment, the present invention provides a method for enhancing yield-related traits in plants relative to control plants, comprising modulating expression in a plant of a nucleic acid encoding an SPT-like polypeptide and optionally selecting for plants having enhanced yield-related traits.

[0163] Furthermore, it has now surprisingly been found that modulating expression in a plant of a nucleic acid encoding an IDI2 polypeptide gives plants having enhanced yield-related traits relative to control plants. According to a first embodiment, the present invention provides a method for enhancing yield-related traits in plants relative to control plants, comprising modulating expression in a plant of a nucleic acid encoding an IDI2 polypeptide and optionally selecting for plants having enhanced yield-related traits.

[0164] The invention also provides hitherto unknown IDI2-encoding nucleic acids and IDI2 polypeptides.

[0165] According to a further embodiment of the present invention, there is therefore provided an isolated nucleic acid molecule selected from:
[0166] (i) a nucleic acid represented by any of SEQ ID NO: 139, 157, 164, 169, 171, 186;
[0167] (ii) the complement of a nucleic acid represented by any of SEQ ID NO: 139, 157, 164, 169, 171, 186;
[0168] (iii) a nucleic acid encoding a GR-RBP polypeptide having, in increasing order of preference, at least 50%, 55%, 60%, 65%, 70%, 75%, 80%, 85%, 90%, 95%, 96%, 97%, 98%, 99% or more sequence identity to the amino acid sequences represented by any of SEQ ID NO: 140, 202, 209, 214, 216, 231, and comprising one or more of the motifs 1 to 6.

[0169] According to a further embodiment of the present invention, there is also provided an isolated polypeptide selected from:
[0170] (i) an amino acid sequence represented by any of SEQ ID NO: 140, 202, 209, 214, 216, 231;
[0171] (ii) an amino acid sequence having, in increasing order of preference, at least 50%, 55%, 60%, 65%, 70%, 75%, 80%, 85%, 90%, 95%, 96%, 97%, 98%, 99% or more sequence identity to the amino acid sequences represented by any one of SEQ ID NO: 140, 202, 209, 214, 216, 231, and comprising one or more of the motifs 1 to 6;
[0172] (iii) derivatives of any of the amino acid sequences given in (i) or (ii) above.

[0173] Furthermore, it has now surprisingly been found that modulating the activity in a plant of an eIF4F-like protein complex gives plants having enhanced yield-related traits relative to control plants. According to a first embodiment, the present invention provides a method for enhancing yield-related traits in plants relative to control plants, comprising modulating the activity in a plant of an eIF4F-like protein complex and optionally selecting for plants having enhanced yield-related traits. An eIF4F-like protein complex is composed of eIF4E, 4A, 4G polypeptide or protein subunits.

[0174] The invention also provides hitherto unknown eIF4F protein complex subunits-encoding nucleic acids and said subunits polypeptides.

[0175] According to a further embodiment of the present invention, there is therefore provided an isolated nucleic acid molecule selected from:
[0176] (i) a nucleic acid represented by SEQ ID NO: 306;
[0177] (ii) the complement of a nucleic acid represented by SEQ ID NO: 306;
[0178] (iii) a nucleic acid encoding the polypeptide as represented by any one of SEQ ID NO: 307, preferably as a result of the degeneracy of the genetic code, said isolated nucleic acid can be derived from a polypeptide sequence as represented by SEQ ID NO: 307 and further preferably confers enhanced yield-related traits relative to control plants;
[0179] (iv) a nucleic acid having, in increasing order of preference at least 30%, 31%, 32%, 33%, 34%, 35%, 36%, 37%, 38%, 39%, 40%, 41%, 42%, 43%, 44%, 45%, 46%, 47%, 48%, 49%, 50%, 51%, 52%, 53%, 54%, 55%, 56%, 57%, 58%, 59%, 60%, 61%, 62%, 63%, 64%, 65%, 66%, 67%, 68%, 69%, 70%, 71%, 72%, 73%, 74%, 75%, 76%, 77%, 78%, 79%, 80%, 81%, 82%, 83%, 84%, 85%, 86%, 87%, 88%, 89%, 90%, 91%, 92%, 93%, 94%, 95%, 96%, 97%, 98%, or 99% sequence identity with any of the nucleic acid sequences of Tables A4 and further preferably conferring enhanced yield-related traits relative to control plants;
[0180] (v) a nucleic acid molecule which hybridizes with a nucleic acid molecule of (i) to (iv) under stringent hybridization conditions and preferably confers enhanced yield-related traits relative to control plants;
[0181] (vi) a nucleic acid encoding at least an eIF4F subunit polypeptide having, in increasing order of preference, at least 50%, 51%, 52%, 53%, 54%, 55%, 56%, 57%, 58%, 59%, 60%, 61%, 62%, 63%, 64%, 65%, 66%, 67%, 68%, 69%, 70%, 71%, 72%, 73%, 74%, 75%, 76%, 77%, 78%, 79%, 80%, 81%, 82%, 83%, 84%, 85%, 86%, 87%, 88%, 89%, 90%, 91%, 92%, 93%, 94%, 95%, 96%, 97%, 98%, or 99% sequence identity to the amino acid sequence represented by SEQ ID NO: 68 and any of the other amino acid sequences in Tables A4 and preferably conferring enhanced yield-related traits relative to control plants.

[0182] According to a further embodiment of the present invention, there is also provided an isolated polypeptide selected from:
[0183] (i) an amino acid sequence represented by SEQ ID NO: 307;
[0184] (ii) an amino acid sequence having, in increasing order of preference, at least 50%, 51%, 52%, 53%, 54%, 55%, 56%, 57%, 58%, 59%, 60%, 61%, 62%, 63%, 64%, 65%, 66%, 67%, 68%, 69%, 70%, 71%, 72%, 73%, 74%, 75%, 76%, 77%, 78%, 79%, 80%, 81%, 82%, 83%, 84%, 85%, 86%, 87%, 88%, 89%, 90%, 91%, 92%, 93%, 94%, 95%, 96%, 97%, 98%, or 99% sequence identity to the amino acid sequence represented by SEQ ID NO: 307 and any of the other amino acid sequences in Tables A4 and preferably conferring enhanced yield-related traits relative to control plants.
[0185] (iii) derivatives of any of the amino acid sequences given in (i) or (ii) above.

[0186] Furthermore, it has now surprisingly been found that modulating expression in a plant of a nucleic acid encoding a GR-RBP polypeptide gives plants having enhanced yield-related traits relative to control plants. According to a first embodiment, the present invention provides a method for enhancing yield-related traits in plants relative to control plants, comprising modulating expression in a plant of a nucleic acid encoding a GR-RBP polypeptide and optionally selecting for plants having enhanced yield-related traits.

[0187] The invention also provides hitherto unknown GR-RBP-encoding nucleic acids and GR-RBP polypeptides.

[0188] According to a further embodiment of the present invention, there is therefore provided an isolated nucleic acid molecule selected from:
[0189] (i) a nucleic acid represented by any of SEQ ID NO: 848, 849, 851, 852, 853, 854, 857, 862, 873, 874, 875, 876, 878, 879, 893, 897, 898, 900, 901, 905, 928, 931, 932, 933, 934, 937;
[0190] (ii) the complement of a nucleic acid represented by any of SEQ ID NO: 848, 849, 851, 852, 853, 854, 857, 862, 873, 874, 875, 876, 878, 879, 893, 897, 898, 900, 901, 905, 928, 931, 932, 933, 934, 937;
[0191] (iii) a nucleic acid encoding a GR-RBP polypeptide having, in increasing order of preference, at least 50%, 55%, 60%, 65%, 70%, 75%, 80%, 85%, 90%, 95%, 96%, 97%, 98%, 99% or more sequence identity to the amino acid sequences represented by any of SEQ ID NO: 945, 946, 948, 949, 950, 951, 954, 959, 970, 971, 972, 973, 975, 976, 990, 994, 995, 997, 998, 1002, 1025, 1028, 1029, 1030, 1031, 1034, and comprising signature sequence 3 (SEQ ID NO: 830) and signature sequence 4 (SEQ ID NO: 831).

[0192] According to a further embodiment of the present invention, there is also provided an isolated polypeptide selected from:
[0193] (i) an amino acid sequence represented by any of SEQ ID NO: 945, 946, 948, 949, 950, 951, 954, 959, 970, 971, 972, 973, 975, 976, 990, 994, 995, 997, 998, 1002, 1025, 1028, 1029, 1030, 1031, 1034;
[0194] (ii) an amino acid sequence having, in increasing order of preference, at least 50%, 55%, 60%, 65%, 70%, 75%, 80%, 85%, 90%, 95%, 96%, 97%, 98%, 99% or more sequence identity to the amino acid sequences represented by any one of SEQ ID NO: 945, 946, 948, 949, 950, 951, 954, 959, 970, 971, 972, 973, 975, 976, 990, 994, 995, 997, 998, 1002, 1025, 1028, 1029, 1030, 1031, 1034, and comprising signature sequence 3 (SEQ ID NO: 830) and signature sequence 4 (SEQ ID NO: 831);
[0195] (iii) derivatives of any of the amino acid sequences given in (i) or (ii) above.

[0196] A preferred method for modulating (preferably, increasing) expression of a nucleic acid encoding a C3H-like polypeptide, or an SPT polypeptide, or an IDI2 polypeptide, or a GR-RBP polypeptide, is by introducing and expressing in a plant a nucleic acid encoding a C3H-like polypeptide, or an SPT polypeptide, or an IDI2 polypeptide, or a GR-RBP polypeptide.

[0197] Concerning C3H-like polypeptides, any reference herein to a “protein useful in the methods of the invention” is taken to mean a C3H-like polypeptide as defined herein. Any reference herein to a “nucleic acid useful in the methods of the invention” is taken to mean a nucleic acid capable of encoding such a C3H-like polypeptide. The nucleic acid to be introduced into a plant (and therefore useful in performing the methods of the invention) is any nucleic acid encoding the type of protein which will now be described, hereafter also named “C3H-like nucleic acid” or “C3H-like gene”.

[0198] A “C3H-like polypeptide” as defined herein refers to any polypeptide comprising Domain 4 and any one or more of Domains 1, 2, 3 and 5:

| | |
|---|---|
| Domain 1: | C-X₂-C-X₁₂₋₂₃-C-X₂-C-X₂-G-F |

wherein X is any amino acid and the underlined residues are conserved

| | |
|---|---|
| Domain 2: | Y-X₇₋₁₂-L-X₃-P-X₁₀-G |

wherein X is any amino acid and the underlined residues are conserved

| | |
|---|---|
| Domain 3: | S-K-X₆-P |

wherein X is any amino acid and the underlined residues are conserved

| | |
|---|---|
| Domain 4: | RING-C3H2C3 type |
| Domain 5: | DUF1117 |

[0199] Preferably, Domain 1 is: CYSCTRFINLSDHTL----------IVCPHCDNGF, or a domain comprising the underlined conserved residues and having, in increasing order of preference, at least 60%, 65%, 70%, 75%, 80%, 85%, 90%, 95% or more sequence identity to the non-underlined residues in Domain 1, where “-” is a gap or any residue.

[0200] Preferably, Domain 2 is: YDDGDG-----SGLRPLPPTVSEFLLGSG, or a domain comprising the underlined conserved residues and having, in increasing order of preference, at least 60%, 65%, 70%, 75%, 80%, 85%, 90%, 95% or more sequence identity to the non-underlined residues in Domain 2, where “-” is a gap or any residue.

[0201] Preferably, Domain 3 is: SKAAIESMP, or a domain comprising the underlined conserved residues and having, in increasing order of preference, at least 60%, 65%, 70%, 75%, 80%, 85%, 90%, 95% or more sequence identity to the non-underlined residues in Domain 3.

[0202] Preferably, Domain 4 is: CAVCKEEFELHAEARELPCKHLYHSDCILPWLTVRNSCPVCR, or a domain comprising the underlined conserved residues and having, in increasing order of preference, at least 60%, 65%, 70%, 75%, 80%, 85%, 90%, 95% or more sequence identity to the non-underlined residues in Domain 4.

[0203] Preferably, Domain 5 is: GLTIWRLPGGGFAVGRFSGGRSA-GESHFPVVYTEMDGGLN, or a domain having, in increasing order of preference, at least 60%, 65%, 70%, 75%, 80%, 85%, 90%, 95% or more sequence identity to Domain 5, where “-” is a gap or any residue.

[0204] Typically, the homologue of a C3H-like polypeptide has in increasing order of preference at least 25%, 26%, 27%, 28%, 29%, 30%, 31%, 32%, 33%, 34%, 35%, 36%, 37%, 38%, 39%, 40%, 41%, 42%, 43%, 44%, 45%, 46%, 47%, 48%, 49%, 50%, 51%, 52%, 53%, 54%, 55%, 56%, 57%, 58%, 59%, 60%, 61%, 62%, 63%, 64%, 65%, 66%, 67%, 68%, 69%, 70%, 71%, 72%, 73%, 74%, 75%, 76%, 77%, 78%, 79%, 80%, 81%, 82%, 83%, 84%, 85%, 86%, 87%, 88%, 89%, 90%, 91%, 92%, 93%, 94%, 95%, 96%, 97%, 98%, or 99% overall sequence identity to the amino acid represented by SEQ ID NO: 2, and comprises DOMAIN4 and any one or more of DOMAIN 1, 2, 3 and 5. The overall sequence identity is determined using a global alignment algorithm, such as the Needleman Wunsch algorithm in the program GAP (GCG Wisconsin Package, Accelrys), preferably with default parameters and preferably with sequences of mature proteins (i.e. without taking into account secretion signals or transit peptides). Compared to overall sequence identity, the sequence identity will generally be higher when only conserved domains or motifs are considered.

[0205] Preferably, the polypeptide sequence which when used in the construction of a phylogenetic tree, such as the one depicted in FIG. 2, clusters with the group of C3H-like polypeptides comprising the amino acid sequence represented by SEQ ID NO: 2 rather than with any other group.

[0206] Concerning SPT-like polypeptides, any reference hereinafter to a “protein useful in the methods of the invention” is taken to mean an SPT-like polypeptide as defined herein. Any reference hereinafter to a “nucleic acid useful in the methods of the invention” is taken to mean a nucleic acid capable of encoding such an SPT-like polypeptide. The nucleic acid to be introduced into a plant (and therefore useful in performing the methods of the invention) is any nucleic acid encoding the type of protein which will now be described, hereinafter also referred to as an “SPT-like nucleic acid” or an “SPT-like gene”.

[0207] An “SPT-like polypeptide” as defined herein refers to any polypeptide comprising each of the following, preferably from N-terminus to C-terminus:

[0208] Motif I: an amphipathic helix comprising EEISTFLHQLLH, or a motif having in increasing order of preference at least 60%, 65%, 70%, 75%, 80%, 85%, 90%, 95% or more sequence identity to motif I.

[0209] Motif II: an acidic domain comprising DLGDFSCDSEK, or a motif having in increasing order of preference at least 60%, 65%, 70%, 75%, 80%, 85%, 90%, 95% or more sequence identity to Motif II.

[0210] Motif III: a bHLH domain comprising: AAEVHNLSEKRRRSRINEKMKALQNLIPNSNKTD KASMLDEAIEYLKQL, or a motif having in increasing order of preference at least 60%, 65%, 70%, 75%, 80%, 85%, 90%, 95% or more sequence identity to Motif III.

[0211] The SPT-like polypeptide preferably further comprises one or more serine-rich regions. A serine-rich region is taken to mean, in increasing order of preference, at least 30%, 40%, 50%, 60%, 70%, 80%, 90% or more serine residues in any given stretch of contiguous amino acids. Preferably, the one or more serine-rich regions are located as shown in the alignment of FIG. 4.

[0212] Preferably, the bHLH domain further comprises one or more nuclear localisation signals (NLS), preferably in the locations indicated in the alignment of FIG. 4.

[0213] The SPT-like polypeptide preferably further comprises a beta strand adjacent the bHLH domain nearest the C-terminal region, which beta strand preferably comprises QLQVQMLTM.

[0214] Additionally or alternatively, the SPT-like polypeptide has in increasing order of preference at least 25%, 26%, 27%, 28%, 29%, 30%, 31%, 32%, 33%, 34%, 35%, 36%, 37%, 38%, 39%, 40%, 41%, 42%, 43%, 44%, 45%, 46%, 47%, 48%, 49%, 50%, 51%, 52%, 53%, 54%, 55%, 56%, 57%, 58%, 59%, 60%, 61%, 62%, 63%, 64%, 65%, 66%, 67%, 68%, 69%, 70%, 71%, 72%, 73%, 74%, 75%, 76%, 77%, 78%, 79%, 80%, 81%, 82%, 83%, 84%, 85%, 86%, 87%, 88%, 89%, 90%, 91%, 92%, 93%, 94%, 95%, 96%, 97%, 98%, or 99% overall sequence identity to the amino acid represented by SEQ ID NO: 97 and comprises each of motifs I to III as defined above. The overall sequence identity is determined using a global alignment algorithm, such as the Needleman Wunsch algorithm in the program GAP (GCG Wisconsin Package, Accelrys), preferably with default parameters and preferably with sequences of mature proteins (i.e. without taking into account secretion signals or transit peptides). Compared to overall sequence identity, the sequence identity will generally be higher when only conserved domains or motifs are considered.

[0215] Preferably, the polypeptide sequence, which when used in the construction of a phylogenetic tree, such as the one depicted in FIG. 5, clusters with the group of SPT-like polypeptides comprising the amino acid sequence represented by SEQ ID NO: 97 (indicated by an arrow) rather than with any other group.

[0216] Concerning IDI2 polypeptides, any reference hereinafter to a “protein useful in the methods of the invention” is taken to mean an IDI2 polypeptide as defined herein. Any reference hereinafter to a “nucleic acid useful in the methods of the invention” is taken to mean a nucleic acid capable of encoding such an IDI2 polypeptide. The nucleic acid to be introduced into a plant (and therefore useful in performing the methods of the invention) is any nucleic acid encoding the type of protein which will now be described, hereafter also named “IDI2 nucleic acid” or “IDI2 gene”.

[0217] A “IDI2 polypeptide” as defined herein refers to any alpha subunit of the eukaryotic translation initiation factor EIF-2B, which alpha subunit comprises an IF-2B domain (Pfam accession PF01008). Preferably, the IDI2 polypeptide also comprises one or more of the following motifs:

Motif 1 (SEQ ID NO: 141):
SL[QR]LLDQRKLPLET[IV]Y[LI][DE][IV][KR]D[SA]ADGWNAI
R[DE]MVVRGAPAIAI
Motif 2 (SEQ ID NO: 142):
HCNTGSLATAGYGTALGVIR[AS]LHS[EG]GVL[EL][RKS]A[YF]
[CA]TETRPFNQ
Motif 3 (SEQ ID NO: 143):
EAAE[TI]ML[VE]DDVA[DS]NKAIGS[HY]G
Motif 4 (SEQ ID NO: 144):
[SA]LRLLDQRKLPLE[MT][DV]YIDVK[DS]SADGWNAIRDMVVRGA
PAIAI
Motif 5 (SEQ ID NO: 145):
CNTGSLATAG[YV]GTALGV[IL]RAL[HR][SE][GT]GVLE[KS]A
[FA][CA]TETRP[FYL]NQG
Motif 6 (SEQ ID NO: 146):
M[KA][SQ]GQV[QD]AV[IV]VGADR[IV]AANGDTANKIGTY

[0218] More preferably, the IDI2 polypeptide comprises at least 2, most preferably 3 of the above motifs.

[0219] Alternatively, the homologue of an IDI2 protein has in increasing order of preference at least 25%, 26%, 27%, 28%, 29%, 30%, 31%, 32%, 33%, 34%, 35%, 36%, 37%, 38%, 39%, 40%, 41%, 42%, 43%, 44%, 45%, 46%, 47%, 48%, 49%, 50%, 51%, 52%, 53%, 54%, 55%, 56%, 57%, 58%, 59%, 60%, 61%, 62%, 63%, 64%, 65%, 66%, 67%, 68%, 69%, 70%, 71%, 72%, 73%, 74%, 75%, 76%, 77%, 78%, 79%, 80%, 81%, 82%, 83%, 84%, 85%, 86%, 87%, 88%, 89%, 90%, 91%, 92%, 93%, 94%, 95%, 96%, 97%, 98%, or 99% overall sequence identity to the amino acid represented by SEQ ID NO: 140, provided that the homologous protein comprises the conserved motifs as outlined above. The overall sequence identity is determined using a global alignment algorithm, such as the Needleman Wunsch algorithm in the program GAP (GCG Wisconsin Package, Accelrys), preferably with default parameters. Compared to overall sequence identity, the sequence identity will generally be higher when only conserved domains or motifs are considered. Preferably the motifs in an IDI2 polypeptide have, in increasing order of preference, at least 70%, 71%, 72%, 73%, 74%, 75%, 76%, 77%, 78%, 79%, 80%, 81%, 82%, 83%, 84%, 85%, 86%, 87%, 88%, 89%, 90%, 91%, 92%, 93%, 94%, 95%, 96%, 97%, 98%, or 99% sequence identity to the motifs represented by SEQ ID NO: 141 to SEQ ID NO: 146 (Motifs 1 to 6).

[0220] Preferably, the polypeptide sequence which when used in the construction of a phylogenetic tree, such as the one depicted in FIG. 9, clusters with the A or B group rather than with any other group, more preferably the polypeptide sequence clusters with the A group of IDI2 polypeptides, which comprises the amino acid sequence represented by SEQ ID NO: 140.

[0221] Concerning an eIF4F-like protein complex subunits, the activity of an eIF4F-like protein complex may preferably be modulated by modulating the expression of one or more of the subunits of the eIF4F-like protein complex, namely the eIF4G and/or eIF4A and/or eIF4E and/or by modulating the levels of the eIF4F-like protein complex. One preferred method for modulating activity of an eIF4F-like protein complex is by introducing and expressing in a plant a nucleic acid encoding an eIF4F-like protein complex subunit, such as one or more of eIF4E, eIF4G, and/or eIF4A and/or isoforms thereof.

[0222] An “eIF4F-like protein complex” as defined herein refers to any protein complex comprising an eIF4E, eIF4G, and/or eIF4A subunits and/or isoforms thereof. In plants, eIF4F occurrence is mainly composed of eIFiso4G, eIFiso4E and eIF4A subunits.

[0223] Functions of the constituent subunits of eIF4F-like protein complex include recognition of the mRNA 5′ cap structure (eIF4E), delivery of an RNA helicase to the 5′ region (eIF4A), bridging of the mRNA and the ribosome (eIF4G), and circularization of the mRNA via interaction with poly(A)-binding protein (eIF4G).

1. Definition of IF4 isoG:

[0224] eIF4 isoG belongs to the eIF4F-like protein complex and is a docking element for eIF4E and eIF4A, eIF4B, polyA binding protein. It is an isoform of eIF4G and its sequence has about 750-800 amino acids. “eIF4 isoG polypeptide” as defined herein refers to any polypeptide comprising the following 3 motifs:

[0225] Motif 7: KAV[LF]EPTFCPMYA[QL]LCSDLNEKLP[PS]FPS[ED]EPGGKEITFKRVLLN[NI]CQE AF or a motif having in an increasing order of preference at least 50%, 51%, 52%, 53%, 54%, 55%, 56%, 57%, 58%, 59%, 60%, 61%, 62%, 63%, 64%, 65%, 66%, 67%, 68%, 69%, 70%, 71%, 72%, 73%, 74%, 75%, 76%, 77%, 78%, 79%, 80%, 81%, 82%, 83%, 84%, 85%, 86%, 87%, 88%, 89%; 90%, 91%, 92%, 93%, 94%, 95%, 96%, 97%, 98%, or 99% or more sequence identity to Motif 7.
[0226] Motif 8: CP[AE]EENVEAIC[QH]FFNTIGKQLDE[SN]PKSRRIND[MVT]YF[SIN][RQ] LKEL[TS][TS]NPQLAPR or a motif having in an increasing order of preference at least 50%, 51%, 52%, 53%, 54%, 55%, 56%, 57%, 58%, 59%, 60%, 61%, 62%, 63%, 64%, 65%, 66%, 67%, 68%, 69%, 70%, 71%, 72%, 73%, 74%, 75%, 76%, 77%, 78%, 79%, 80%, 81%, 82%, 83%, 84%, 85%, 86%, 87%, 88%, 89%, 90%, 91%, 92%, 93%, 94%, 95%, 96%, 97%, 98%, or 99% or more sequence identity to Motif 8.

[0227] Motif 9: T[AG]P[DE]QE[ML]ERRDKERLVKLRTLGNIRLIGELLKQKMVPEKIVHHIVQELLG or a motif having in an increasing order of preference at least 50%, 51%, 52%, 53%, 54%, 55%, 56%, 57%, 58%, 59%, 60%, 61%, 62%, 63%, 64%, 65%, 66%, 67%, 68%, 69%, 70%, 71%, 72%, 73%, 74%, 75%, 76%, 77%, 78%, 79%, 80%, 81%, 82%, 83%, 84%, 85%, 86%, 87%, 88%, 89%, 90%, 91%, 92%, 93%, 94%, 95%, 96%, 97%, 98%, or 99% or more sequence identity to Motif 9.

[0228] Preferably, eIF4 isoG polypeptide of the invention comprises the following conserved domains: MA3 (PFam accession number: PF02847) and MIF4G (PFam accession number: PF02854).

### 2. Definition of IF4G:

[0229] eIF4G belongs to the eIF4F-like protein complex and is also a docking element for eIF4E and eIF4A, eIF4B, polyA binding protein, thus having an equivalent binding functionally as eIF4 isoG in what regards to its role in translation. Its sequence has about 1570-1900 amino acids. “eIF4G polypeptide” as defined herein refers to any polypeptide comprising the following 3 motifs:

[0230] Motif 10: TPQNF[ED][KR]LFEQVKAVNIDN[AV]VTL[TN]GVISQIF[DE]KALMEPTFCEMYANFC FH or a motif having in an increasing order of preference at least 50%, 51%, 52%, 53%, 54%, 55%, 56%, 57%, 58%, 59%, 60%, 61%, 62%, 63%, 64%, 65%, 66%, 67%, 68%, 69%, 70%, 71%, 72%, 73%, 74%, 75%, 76%, 77%, 78%, 79%, 80%, 81%, 82%, 83%, 84%, 85%, 86%, 87%, 88%, 89%, 90%, 91%, 92%, 93%, 94%, 95%, 96%, 97%, 98%, or 99% or more sequence identity to Motif 10.

[0231] Motif 11: IGELYKK[RK]MLTERIMHECIKKLLGQYQ[DN]PDEE[DN][IV]E[AS]LCKLMSTIGEMI DH or a motif having in an increasing order of preference at least 50%, 51%, 52%, 53%, 54%, 55%, 56%, 57%, 58%, 59%, 60%, 61%, 62%, 63%, 64%, 65%, 66%, 67%, 68%, 69%, 70%, 71%, 72%; 73%, 74%, 75%, 76%, 77%, 78%, 79%, 80%, 81%, 82%, 83%, 84%, 85%, 86%, 87%, 88%, 89%, 90%, 91%, 92%, 93%, 94%, 95%, 96%, 97%, 98%, or 99% or more sequence identity to Motif 11.

[0232] Motif 12: LSNN[MQ][KN]LSSRVRFMLKD[ASV]IDLRKNKWQQRRKVEGPKKIEEVHRDAAQE RQ or a motif having in an increasing order of preference at least 50%, 51%, 52%, 53%, 54%, 55%, 56%, 57%, 58%, 59%, 60%, 61%, 62%, 63%, 64%, 65%, 66%, 67%, 68%, 69%, 70%, 71%, 72%, 73%, 74%, 75%, 76%, 77%, 78%, 79%, 80%, 81%, 82%, 83%, 84%, 85%, 86%, 87%, 88%, 89%, 90%, 91%, 92%, 93%, 94%, 95%, 96%, 97%, 98%, or 99% or more sequence identity to Motif 12.

[0233] Preferably, eIF4G polypeptide of the invention comprises the following conserved domains: MA3 (PFam accession number: PF02847) and MIF4G (PFam accession number: PF02854).

3. Definition of eIF4A polypeptide:

[0234] eIF4A polypeptide also a subunit of eIF4F-like protein complex and is the polypeptide that binds to eIF4G/isoG and recruits eIF4B at the m7 Gppp cap of the mRNA. Its sequence has about 369-414 amino acids long. “eIF4A polypeptide” as defined herein refers to any polypeptide comprising the following 3 motifs:

[0235] Motif 13: RDELTLEGIKQF[YF]V[NA]V[ED][KR]EEWK[LF][DE]TLCDLY[ED]TL[AT] ITQ[SA]VIF or a motif having in an increasing order of preference at least 50%, 51%, 52%, 53%, 54%, 55%, 56%, 57%, 58%, 59%, 60%, 61%, 62%, 63%, 64%, 65%, 66%, 67%, 68%, 69%, 70%, 71%, 72%, 73%, 74%, 75%, 76%, 77%, 78%, 79%, 80%, 81%, 82%, 83%, 84%, 85%, 86%, 87%, 88%, 89%, 90%, 91%, 92%, 93%, 94%, 95%, 96%, 97%, 98%, or 99% or more sequence identity to Motif 13.

[0236] Motif 14: SLVINYDLP[TN][QN][PR]E[NL]Y[LI]HRIGRSGRFGRKGVAINF or a motif having in an increasing order of preference at least 50%, 51%, 52%, 53%, 54%, 55%, 56%, 57%, 58%, 59%, 60%, 61%, 62%, 63%, 64%, 65%, 66%, 67%, 68%, 69%, 70%, 71%, 72%, 73%, 74%, 75%, 76%, 77%, 78%, 79%, 80%, 81%, 82%, 83%, 84%, 85%, 86%, 87%, 88%, 89%, 90%, 91%, 92%, 93%, 94%, 95%, 96%, 97%, 98%, or 99% or more sequence identity to Motif 14.

[0237] Motif 15: MG[LI][QK]E[ND]LLRGIYAYGFEKPSAIQQR[GA][IV]VP[FI][CI]KG[LR]DVI[QA]QAQ SGTGKT[AS][TM][FI] or a motif having in an increasing order of preference at least 50%, 51%, 52%, 53%, 54%, 55%, 56%, 57%, 58%, 59%, 60%, 61%, 62%, 63%, 64%, 65%, 66%, 67%, 68%, 69%, 70%, 71%, 72%, 73%, 74%, 75%, 76%, 77%, 78%, 79%, 80%, 81%, 82%, 83%, 84%, 85%, 86%, 87%, 88%, 89%, 90%, 91%, 92%, 93%, 94%, 95%, 96%, 97%, 98%, or 99% or more sequence identity to Motif 15.

[0238] Preferably, eIF4A polypeptide of the invention comprises the following conserved domains: DEAD (PFam accession number: PF00270) and Helicase_C(PFam accession number: PF00271).

4. Definition of eIF4E polypeptide:

[0239] eIF4E polypeptide is also a subunit of eIF4F-like protein complex and is the polypeptide that binds to eIF4G/isoG and to the m7 Gppp cap of the mRNA in the translation initiation process. It has about 195-286 amino acids long. “eIF4E polypeptide” as defined herein refers to any polypeptide comprising the following 3 motifs:

[0240] Motif 16: YTFSTVE[ED]FW[SG]LYNNIH[HR]PSKLAVGADF[HY]CFK[NH]KIEPKWEDP[VI]CA NGGKW or a motif having in an increasing order of preference at least 50%, 51%, 52%, 53%, 54%, 55%, 56%, 57%, 58%, 59%, 60%, 61%, 62%, 63%, 64%, 65%, 66%, 67%, 68%, 69%, 70%, 71%, 72%, 73%, 74%, 75%, 76%, 77%, 78%, 79%, 80%, 81%, 82%, 83%, 84%, 85%, 86%, 87%, 88%, 89%, 90%, 91%, 92%, 93%, 94%, 95%, 96%, 97%, 98%, or 99% or more sequence identity to Motif 16.

[0241] Motif 17: T[SC]WLYTLLA[ML]IGEQFD[HY]GD[ED]ICGAVV[NS]VR or a motif having in an increasing order of preference at least 50%, 51%, 52%, 53%, 54%, 55%, 56%, 57%, 58%, 59%, 60%, 61%, 62%, 63%, 64%, 65%, 66%, 67%, 68%, 69%, 70%, 71%, 72%, 73%, 74%, 75%, 76%, 77%, 78%, 79%, 80%, 81%, 82%, 83%, 84%, 85%, 86%, 87%, 88%, 89%, 90%, 91%, 92%, 93%, 94%, 95%, 96%, 97%, 98%, or 99% or more sequence identity to Motif 17.

[0242] Motif 18: E[KR]I[AS][LI]WTKNA[AS]NE[AST]AQ[VL]SIGKQWKEFLDYN[DE][TS]IGFIFH[ED]DA or a motif having in an increasing order of preference at least 50%, 51%, 52%, 53%, 54%, 55%, 56%, 57%, 58%, 59%, 60%, 61%, 62%, 63%, 64%, 65%, 66%, 67%, 68%, 69%, 70%, 71%, 72%, 73%, 74%, 75%, 76%, 77%, 78%, 79%, 80%, 81%, 82%, 83%, 84%, 85%, 86%, 87%, 88%, 89%, 90%, 91%, 92%, 93%, 94%, 95%, 96%, 97%, 98%, or 99% or more sequence identity to Motif 18.

[0243] Preferably, eIF4E polypeptide of the invention comprises the following conserved domain: IF4E (PFam accession number: PF01652).

5. Definition of eIF4 isoE Polypeptide:

[0244] eIF4 isoE polypeptide is a isoform of eIF4E and a subunit of eIF4F-like protein complex. It has the same binding activities than eIF4E and has about 189-217 amino acid long. “eIF4 isoE polypeptide” as defined herein refers to any polypeptide comprising the following 3 motifs:

[0245] Motif 19: WCLYDQ[IV]F[KR]PSKLP[GA]NADFHLFKAG[VI]EPKWEDPECANGGKW or a motif having in an increasing order of preference at least 50%, 51%, 52%, 53%, 54%, 55%, 56%, 57%, 58%, 59%, 60%, 61%, 62%, 63%, 64%, 65%, 66%, 67%, 68%, 69%, 70%, 71%, 72%, 73%, 74%, 75%, 76%, 77%, 78%, 79%, 80%, 81%, 82%, 83%, 84%, 85%, 86%, 87%, 88%, 89%, 90%, 91%, 92%, 93%, 94%, 95%, 96%, 97%, 98%, or 99% or more sequence identity to Motif 19.

[0246] Motif 20: L[ED]TMWLETLMALIGEQFD[ED][AS][DE][ED]ICGWASVR or a motif having in an increasing order of preference at least 50%, 51%, 52%, 53%, 54%, 55%, 56%, 57%, 58%, 59%, 60%, 61%, 62%, 63%, 64%, 65%, 66%, 67%, 68%, 69%, 70%, 71%, 72%, 73%, 74%, 75%, 76%, 77%, 78%, 79%, 80%, 81%, 82%, 83%, 84%, 85%, 86%, 87%, 88%, 89%, 90%, 91%, 92%, 93%, 94%, 95%, 96%, 97%, 98%, or 99% or more sequence identity to Motif 20.

[0247] Motif 21: QDKL[SA]LWT[KR][TN]A[AS]NEA[AV]QM[SG]IG[RK]KWKE[IV]ID or a motif having in an increasing order of preference at least 50%, 51%, 52%, 53%, 54%, 55%, 56%, 57%, 58%, 59%, 60%, 61%, 62%, 63%, 64%, 65%, 66%, 67%, 68%, 69%, 70%, 71%, 72%, 73%, 74%, 75%, 76%, 77%, 78%, 79%, 80%, 81%, 82%, 83%, 84%, 85%, 86%, 87%, 88%, 89%, 90%, 91%, 92%, 93%, 94%, 95%, 96%, 97%, 98%, or 99% or more sequence identity to Motif 21.

[0248] Preferably, eIF4 isoE polypeptide of the invention comprises the following conserved domain: IF4E (PFam accession number: PF01652).

[0249] In a preferred embodiment of the present invention the expression of eIF4G and its isoform is increased, most preferably eIF4 isoG is overexpressed.

[0250] In other preferred embodiment of the present invention the expression of eIF4A is increased.

[0251] In a most preferred embodiment of the present invention eIF4 isoG and/or eIF4A are overexpressed and the expression of eIF4 isoE is decreased, being preferably eIF4 isoG and eIF4A overexpressed.

[0252] Alternatively, the homologue of the eIF4F-like protein complex subunits polypeptides has in increasing order of preference at least 25%, 26%, 27%, 28%, 29%, 30%, 31%, 32%, 33%, 34%, 35%, 36%, 37%, 38%, 39%, 40%, 41%, 42%, 43%, 44%, 45%, 46%, 47%, 48%, 49%, 50%, 51%, 52%, 53%, 54%, 55%, 56%, 57%, 58%, 59%, 60%, 61%, 62%, 63%, 64%, 65%, 66%, 67%, 68%, 69%, 70%, 71%, 72%, 73%, 74%, 75%, 76%, 77%, 78%, 79%, 80%, 81%, 82%, 83%, 84%, 85%, 86%, 87%, 88%, 89%, 90%, 91%, 92%, 93%, 94%, 95%, 96%, 97%, 98%, or 99% overall sequence identity to the amino acid represented by SEQ ID NO: 241, by SEQ ID NO: 301 and/or SEQ ID NO. 561 provided that the homologous protein comprises the conserved motifs as outlined above. The overall sequence identity is determined using a global alignment algorithm, such as the Needleman Wunsch algorithm in the program GAP (GCG Wisconsin Package, Accelrys), preferably with default parameters and preferably with sequences of mature proteins (i.e. without taking into account secretion signals or transit peptides). Compared to overall sequence identity, the sequence identity will generally be higher when only conserved domains or motifs are considered. For local alignments, the Smith-Waterman algorithm is particularly useful (Smith T F, Waterman M S (1981) J. Mol. Biol. 147(1); 195-7).

[0253] Preferably, the polypeptides sequences of the eIF4F subunits, which when used in the construction of a phylogenetic tree, such as the one depicted in FIGS. 12, 13 and 14, clusters with the group of eIF4F-like protein complex subunits, such as eIF4 isoG, eIF4A and eIF4 isoE comprising the amino acid sequences represented respectively by SEQ ID NO: 241, SEQ ID NO: 301, and/or SEQ ID NO: 561.

[0254] Most preferably the polypeptides sequences of the present invention clusters with the group of eIF4F-like protein complex subunit eIF4 isoG are codified by SEQ ID NO: 241, rather than with any other group.

[0255] Concerning GR-RBP polypeptides, any reference hereinafter to a “protein useful in the methods of the invention” is taken to mean a GR-RBP polypeptide as defined herein. Any reference hereinafter to a “nucleic acid useful in the methods of the invention” is taken to mean a nucleic acid capable of encoding such a GR-RBP polypeptide. The nucleic acid to be introduced into a plant (and therefore useful in performing the methods of the invention) is any nucleic acid encoding the type of protein which will now be described, hereafter also named “GR-RBP nucleic acid” or “GR-RBP gene”.

[0256] A “GR-RBP polypeptide” as defined herein refers to any RNA binding polypeptide comprising an RNA Recognition Motif 1 (PFam accession PF00076, RRM_{—}1). Preferably the GR-RBP polypeptide further comprises one or more of the following signature sequences:

Signature sequence 1 (SEQ ID NO: 828):
GGYGG
Signature sequence 2 (SEQ ID NO: 829):
GGYG
Signature sequence 3 (SEQ ID NO: 830):
[CLIV][FY][IV]GG[LIMV]
Signature sequence 4 (SEQ ID NO: 831):
RGF[GA]F[IV][SDHTN][FY]

[0257] Preferably the GR-RBP polypeptide comprises a HMMPanther PTHR10432:SF31 RRM_Gly_rich domain. Optionally, the GR-RBP polypeptide also comprises a glycine rich domain in the C-terminal half of the protein. The term “glycine rich domain” as used in the present invention refers to a stretch of at least 10, preferably at least 11, preferably at least 12, more preferably at least 13, most preferably at least 15 amino acids in the sequence of the GR-RBP polypeptide that comprises at least 30% glycine residues.

[0258] Further preferably, the GR-RBP polypeptide comprises one or more of the following motifs:

Motif 22 (SEQ ID NO: 832):
S[ST]KLF[VI]GGL[SA][WY]GTDD[QH]SL[RK][ED]AF[SA]S
[FY]G[ED]V[VT][ED]A[RK][VI]I[TV]DR[ED][TS]GRSRGFGF
V[TNS][FY]
Motif 23 (SEQ ID NO: 833):
S[ST]KLF[VI]GGL[SA][WY]GTDD[QH]SL[RK][ED]AF[AS]
[SK][FY]G[ED]V[VTI][ED]A[RK][VI]I[TV]DR[ED]TGRSRGF
GFV[TNS][FY]
Motif 24 (SEQ ID NO: 834):
[ML]DG[KQ][ED]L[DN]GRN[IV]RV[NS]YAN[ED]RP[SR]
Motif 25 (SEQ ID NO: 835):
[SE]E[EDA]A[KS][AS]AISAMDG[KQ][ED]LNGRN[IV]RV[NS]
YA[NT][ED]R
Motif 26 (SEQ ID NO: 836):
MA[FA]LNKLG[SG][LA]LRQSA
Motif 27 (SEQ ID NO: 837):
MA[FA][LCF]NKLG[SGN]LLRQSASS[SN]SAS

[0259] More preferably, the GR-RBP polypeptide comprises in increasing order of preference, at least 2, or at least 3 of the above motifs.

[0260] Alternatively, the homologue of a GR-RBP protein has in increasing order of preference at least 25%, 26%, 27%, 28%, 29%, 30%, 31%, 32%, 33%, 34%, 35%, 36%, 37%, 38%, 39%, 40%, 41%, 42%, 43%, 44%, 45%, 46%, 47%, 48%, 49%, 50%, 51%, 52%, 53%, 54%, 55%, 56%, 57%, 58%, 59%, 60%, 61%, 62%, 63%, 64%, 65%, 66%, 67%, 68%, 69%, 70%, 71%, 72%, 73%, 74%, 75%, 76%, 77%, 78%, 79%, 80%, 81%, 82%, 83%, 84%, 85%, 86%, 87%, 88%, 89%, 90%, 91%, 92%, 93%, 94%, 95%, 96%, 97%, 98%, or 99% overall sequence identity to the amino acid represented by SEQ ID NO: 827, provided that the homologous protein comprises one, two or three of the conserved motifs as outlined above. The overall sequence identity is determined using a global alignment algorithm, such as the Needleman Wunsch algorithm in the program GAP (GCG Wisconsin Package, Accelrys), preferably with default parameters. Compared to overall sequence identity, the sequence identity will generally be higher when only conserved domains or motifs are considered. Preferably the motifs in a GR-RBP polypeptide have, in increasing order of preference, at least 70%, 71%, 72%, 73%, 74%, 75%, 76%, 77%, 78%, 79%, 80%, 81%, 82%, 83%, 84%, 85%, 86%, 87%, 88%, 89%, 90%, 91%, 92%, 93%, 94%, 95%, 96%, 97%, 98%, or 99% sequence identity to the motifs represented by SEQ ID NO: 832 to SEQ ID NO: 837 (Motifs 22 to 27).

[0261] Preferably, the polypeptide sequence which when used in the construction of a phylogenetic tree, such as the one depicted in FIG. 18 clusters with the A or B group rather than with any other group, more preferably with the A group of GR-RBP polypeptides, which comprises the amino acid sequence represented by SEQ ID NO: 827.

[0262] The terms “domain”, “signature” and “motif” are defined in the “definitions” section herein. Specialist databases exist for the identification of domains, for example, SMART (Schultz et al. (1998) Proc. Natl. Acad. Sci. USA 95, 5857-5864; Letunic et al. (2002) Nucleic Acids Res 30, 242-244), InterPro (Mulder et al., (2003) Nucl. Acids. Res. 31, 315-318), Prosite (Bucher and Bairoch (1994), A generalized profile syntax for biomolecular sequences motifs and its function in automatic sequence interpretation. (In) ISMB-94; Proceedings 2nd International Conference on Intelligent Systems for Molecular Biology. Altman R., Brutlag D., Karp P., Lathrop R., Searls D., Eds., pp 53-61, AAAI Press, Menlo Park; Hulo et al., Nucl. Acids. Res. 32:D134-D137, (2004)), or Pfam (Bateman et al., Nucleic Acids Research 30(1): 276-280 (2002)). A set of tools for in silico analysis of protein sequences is available on the ExPASy proteomics server (Swiss Institute of Bioinformatics (Gasteiger et al., ExPASy: the proteomics server for in-depth protein knowledge and analysis, Nucleic Acids Res. 31:3784-3788 (2003)). Domains or motifs may also be identified using routine techniques, such as by sequence alignment.

[0263] Methods for the alignment of sequences for comparison are well known in the art, such methods include GAP, BESTFIT, BLAST, FASTA and TFASTA. GAP uses the algorithm of Needleman and Wunsch ((1970) J Mol Biol 48: 443-453) to find the global (i.e. spanning the complete sequences) alignment of two sequences that maximizes the number of matches and minimizes the number of gaps. The BLAST algorithm (Altschul et al. (1990) J Mol Biol 215: 403-10) calculates percent sequence identity and performs a statistical analysis of the similarity between the two sequences. The software for performing BLAST analysis is publicly available through the National Centre for Biotechnology Information (NCBI). Homologues may readily be identified using, for example, the ClustalW multiple sequence alignment algorithm (version 1.83), with the default pairwise alignment parameters, and a scoring method in percentage. Global percentages of similarity and identity may also be determined using one of the methods available in the MatGAT software package (Campanella et al., BMC Bioinformatics. 2003 Jul. 10; 4:29. MatGAT: an application that generates similarity/identity matrices using protein or DNA sequences.). Minor manual editing may be performed to optimise alignment between conserved motifs, as would be apparent to a person skilled in the art. Furthermore, instead of using full-length sequences for the identification of homologues, specific domains may also be used. The sequence identity values may be determined over the entire nucleic acid or amino acid sequence or over selected domains or conserved motif(s), using the programs mentioned above using the default parameters. For local alignments, the Smith-Waterman algorithm is particularly useful (Smith T F, Waterman M S (1981) J. Mol. Biol. 147(1); 195-7).

[0264] In addition, C3H-like polypeptides, when expressed in rice according to the methods of the present invention as outlined in the Examples section herein, give plants having increased yield-related traits, in particular increased aboveground area, and increased seed yield relative to control plants.

[0265] Additionally, C3H-like polypeptides may display a preferred subcellular localization, typically one or more of nuclear, cytoplasmic, chloroplastic, or mitochondrial. The task of protein subcellular localisation prediction is well studied. Experimental methods for protein localization range from immunolocalization to tagging of proteins using green fluorescent protein (GFP) or beta-glucuronidase (GUS). Such methods are accurate although labour-intensive compared with computational methods. Recently much progress has been made in computational prediction of protein localisation from sequence data. Among algorithms well known to a person skilled in the art are available at the ExPASy Proteomics tools hosted by the Swiss Institute for Bioinformatics, for example, PSort, TargetP, ChloroP, LocTree, Predotar, LipoP, MITOPROT, PATS, PTS1, SignalP, TMHMM, and others.

[0266] Furthermore, SPT-like polypeptides (at least in their native form) typically have DNA-binding activity. Tools and techniques for measuring DNA-binding activity are well known in the art.

[0267] In addition, SPT-like polypeptides, when expressed in rice according to the methods of the present invention as outlined in the Examples Section hereinafter, give plants having enhanced yield-related related traits, in particular increased Thousand Kernel Weight (TKW) relative to control plants.

[0268] SPT-like polypeptides are typically localised in the nucleus due to the presence of the nuclear localisation signals (see the alignment of FIG. 4) in the SPT-like polypeptides. Experimental methods for determining protein localization range from immunolocalization to tagging of proteins using green fluorescent protein (GFP) or beta-glucuronidase (GUS). Such methods are accurate although labour-intensive compared with computational methods. Recently much progress has been made in computational prediction of protein localisation from sequence data. Among algorithms well known to a person skilled in the art are available at the ExPASy Proteomics tools hosted by the Swiss Institute for Bioinformatics, for example, PSort, TargetP, ChloroP, LocTree, Predotar, LipoP, MITOPROT, PATS, PTS1, SignalP, TMHMM, and others.

[0269] Furthermore, IDI2 polypeptides, as alpha subunits of eIF2B (at least in their native form) may mediate phosphorylation of eIF2. Tools and techniques for measuring eIF2Balpha subunit activity are well known in the art, see for example Fabian et al (J. Biol. Chem. 272, 12359-12369, 1997 and Prot. Expr. Purif. 13, 16-22, 1998). Further details are provided in Example 6.

[0270] In addition, IDI2 polypeptides, when expressed in rice according to the methods of the present invention as outlined in Examples 7 and 8, give plants, when grown under nutrient limitation, having increased yield-related traits, in particular increased total weight of seeds, increased number of filled seeds and/or increased harvest index.

[0271] Furthermore, eIF4F-like protein complex subunits (at least in their native form) typically have translational activity. Tools and techniques for measuring this activity are well known in the art.

[0272] In addition, eIF4F-like protein complex subunits, when expressed in rice according to the methods of the present invention as outlined in Examples 8 and 9, give plants having increased yield related traits, in particular maximum height per plant, number of flowers (florets) per panicle and number of plants per square meter (harvested index).

[0273] Additionally, eIF4F-like protein complex subunits may display a preferred subcellular localization, typically one or more of nuclear, cytoplasmic, chloroplastic, or mitochondrial. The task of protein subcellular localisation prediction is important and well studied. Knowing a protein's localisation helps elucidate its function. Experimental methods for protein localization range from immunolocalization to tagging of proteins using green fluorescent protein (GFP) or beta-glucuronidase (GUS). Such methods are accurate although labor-intensive compared with computational methods. Recently much progress has been made in computational prediction of protein localisation from sequence data. Among algorithms well known to a person skilled in the art are available at the ExPASy Proteomics tools hosted by the Swiss Institute for Bioinformatics, for example, PSort, TargetP, ChloroP, LocTree, Predotar, LipoP, MITOPROT, PATS, PTS1, SignalP, TMHMM, and others.

[0274] Furthermore, GR-RBP polypeptides (at least in their native form) typically have RNA-binding activity. Tools and techniques for measuring RNA-binding activity are well known in the art, see for example Kwak et al. (2005) or Hirose et al. (Nucl. Ac. Res. 21, 3981-3987, 1993). Further details are provided in Example 6.

[0275] In addition, GR-RBP polypeptides, when expressed in rice according to the methods of the present invention as outlined in Examples 7 and 8, give plants having increased yield related traits, in particular increased fill rate, when the plants are grown under drought stress conditions.

[0276] Concerning C3H-like polypeptides, the present invention is illustrated by transforming plants with the nucleic acid sequence represented by SEQ ID NO: 1, encoding the polypeptide sequence of SEQ ID NO: 2. However, performance of the invention is not restricted to these sequences; the methods of the invention may advantageously be performed using any C3H-like-encoding nucleic acid or C3H-like polypeptide as defined herein.

[0277] Examples of nucleic acids encoding C3H-like polypeptides are given in Table A1 of the Examples section herein. Such nucleic acids are useful in performing the methods of the invention. The amino acid sequences given in Table A1 of the Examples section are example sequences of orthologues and paralogues of the C3H-like polypeptide represented by SEQ ID NO: 2, the terms “orthologues” and “paralogues” being as defined herein. Further orthologues and paralogues may readily be identified by performing a so-called reciprocal blast search. Typically, this involves a first BLAST involving BLASTing a query sequence (for example using any of the sequences listed in Table A1 of the Examples section) against any sequence database, such as the publicly available NCBI database. BLASTN or TBLASTX (using standard default values) are generally used when starting from a nucleotide sequence, and BLASTP or TBLASTN (using standard default values) when starting from a protein sequence. The BLAST results may optionally be filtered. The full-length sequences of either the filtered results or non-filtered results are then BLASTed back (second BLAST) against sequences from the organism from which the query sequence is derived (where the query sequence is SEQ ID NO: 1 or SEQ ID NO: 2, the second BLAST would therefore be against Medicago sequences). The results of the first and second BLASTs are then compared. A paralogue is identified if a high-ranking hit from the first blast is from the same species as from which the query sequence is derived, a BLAST back then ideally results in the query sequence amongst the highest hits; an orthologue is identified if a high-ranking hit in the first BLAST is not from the same species as from which the query sequence is derived, and preferably results upon BLAST back in the query sequence being among the highest hits.

[0278] Concerning SPT-like polypeptides, the present invention is illustrated by transforming plants with the nucleic acid sequence represented by SEQ ID NO: 96, encoding the polypeptide sequence of SEQ ID NO: 97. However, performance of the invention is not restricted to these sequences; the methods of the invention may advantageously be performed using any SPT-like-encoding nucleic acid or SPT-like polypeptide as defined herein.

[0279] Examples of nucleic acids encoding SPT-like polypeptides are given in Table A2 of the Examples section herein. Such nucleic acids are useful in performing the methods of the invention. The amino acid sequences given in Table A2 of the Examples section are example sequences of orthologues and paralogues of the SPT-like polypeptide represented by SEQ ID NO: 97, the terms “orthologues” and “paralogues” being as defined herein. Further orthologues and paralogues may readily be identified by performing a so-called reciprocal blast search. Typically, this involves a first BLAST involving BLASTing a query sequence (for example using any of the sequences listed in Table A2 of the Examples section) against any sequence database, such as the publicly available NCBI database. BLASTN or TBLASTX (using standard default values) are generally used when starting from a nucleotide sequence, and BLASTP or TBLASTN (using standard default values) when starting from a protein sequence. The BLAST results may optionally be filtered. The full-length sequences of either the filtered results or non-filtered results are then BLASTed back (second BLAST) against sequences from the organism from which the query sequence is derived (where the query sequence is SEQ ID NO: 96 or SEQ ID NO: 97, the second BLAST would therefore be against poplar sequences). The results of the first and second BLASTs are then compared. A paralogue is identified if a high-ranking hit from the first blast is from the same species as from which the query sequence is derived, a BLAST back then ideally results in the query sequence amongst the highest hits; an orthologue is identified if a high-ranking hit in the first BLAST is not from the same species as from which the query sequence is derived, and preferably results upon BLAST back in the query sequence being among the highest hits.

[0280] Concerning IDI2 polypeptides, the present invention is illustrated by transforming plants with the nucleic acid sequence represented by SEQ ID NO: 139, encoding the polypeptide sequence of SEQ ID NO: 140. However, performance of the invention is not restricted to these sequences; the methods of the invention may advantageously be performed using any IDI2-encoding nucleic acid or IDI2 polypeptide as defined herein.

[0281] Examples of nucleic acids encoding IDI2 polypeptides are given in Table A3 of the Examples section herein. Such nucleic acids are useful in performing the methods of the invention. The amino acid sequences given in Table A3 of the Examples section are example sequences of orthologues and paralogues of the IDI2 polypeptide represented by SEQ ID NO: 2, the terms “orthologues” and “paralogues” being as defined herein. Further orthologues and paralogues may readily be identified by performing a so-called reciprocal blast search. Typically, this involves a first BLAST involving BLASTing a query sequence (for example using any of the sequences listed in Table A3 of the Examples section) against any sequence database, such as the publicly available NCBI database. BLASTN or TBLASTX (using standard default values) are generally used when starting from a nucleotide sequence, and BLASTP or TBLASTN (using standard default values) when starting from a protein sequence. The BLAST results may optionally be filtered. The full-length sequences of either the filtered results or non-filtered results are then BLASTed back (second BLAST) against sequences from the organism from which the query sequence is derived (where the query sequence is SEQ ID NO: 139 or SEQ ID NO: 140, the second BLAST would therefore be against Saccharum officinarum sequences). The results of the first and second BLASTs are then compared. A paralogue is identified if a high-ranking hit from the first blast is from the same species as from which the query sequence is derived, a BLAST back then ideally results in the query sequence amongst the highest hits; an orthologue is identified if a high-ranking hit in the first BLAST is not from the same species as from which the query sequence is derived, and preferably results upon BLAST back in the query sequence being among the highest hits.

[0282] Concerning eIF4F-like protein complex subunits, the present invention is illustrated by transforming plants with at least a nucleic acid with the following sequences represented by: SEQ ID NO: 240, encoding the polypeptide sequence of SEQ ID NO: 241, SEQ ID NO 300, encoding the polypeptide sequence of SEQ ID NO: 301 and SEQ ID NO 560, encoding the polypeptide sequence of SEQ ID NO: 561. However, performance of the invention is not restricted to these sequences; the methods of the invention may advantageously be performed using at least one eIF4F-like protein complex subunit-encoding nucleic acid or at least one eIF4F-like protein complex subunit as defined herein.

[0283] Examples of nucleic acids encoding eIF4F-like protein complex subunits are given in Tables A4 of the Examples section herein. In the scope of the present invention, “Tables A4” comprise Table A4a, A4b and A4c. Such nucleic acids are useful in performing the methods of the invention. The amino acid sequences given in Tables A4 of the Examples section are example sequences of orthologues and paralogues of the eIF4F-like protein complex subunits represented by SEQ ID NO: 241, SEQ ID NO 301 and SEQ ID NO: 561 and by, the terms “orthologues” and “paralogues” being as defined herein. Further orthologues and paralogues may readily be identified by performing a so-called reciprocal blast search. Typically, this involves a first BLAST involving BLASTing a query sequence (for example using any of the sequences listed in Tables A4 of the Examples section) against any sequence database, such as the publicly available NCBI database. BLASTN or TBLASTX (using standard default values) are generally used when starting from a nucleotide sequence, and BLASTP or TBLASTN (using standard default values) when starting from a protein sequence. The BLAST results may optionally be filtered. The full-length sequences of either the filtered results or non-filtered results are then BLASTed back (second BLAST) against sequences from the organism from which the query sequence is derived (where the query sequence is SEQ ID NO: 240 or SEQ ID NO: 241, the second BLAST would therefore be against rice sequences). The results of the first and second BLASTs are then compared. A paralogue is identified if a high-ranking hit from the first blast is from the same species as from which the query sequence is derived, a BLAST back then ideally results in the query sequence amongst the highest hits; an orthologue is identified if a high-ranking hit in the first BLAST is not from the same species as from which the query sequence is derived, and preferably results upon BLAST back in the query sequence being among the highest hits.

[0284] Concerning GR-RBP polypeptides, the present invention is illustrated by transforming plants with the nucleic acid sequence represented by SEQ ID NO: 826, encoding the polypeptide sequence of SEQ ID NO: 827. However, performance of the invention is not restricted to these sequences; the methods of the invention may advantageously be performed using any GR-RBP-encoding nucleic acid or GR-RBP polypeptide as defined herein.

[0285] Examples of nucleic acids encoding GR-RBP polypeptides are given in Table A5 of the Examples section herein. Such nucleic acids are useful in performing the methods of the invention. The amino acid sequences given in Table A5 of the Examples section are example sequences of orthologues and paralogues of the GR-RBP polypeptide represented by SEQ ID NO: 827, the terms “orthologues” and “paralogues” being as defined herein. Further orthologues and paralogues may readily be identified by performing a so-called reciprocal blast search. Typically, this involves a first BLAST involving BLASTing a query sequence (for example using any of the sequences listed in Table A5 of the Examples section) against any sequence database, such as the publicly available NCBI database. BLASTN or TBLASTX (using standard default values) are generally used when starting from a nucleotide sequence, and BLASTP or TBLASTN (using standard default values) when starting from a protein sequence. The BLAST results may optionally be filtered. The full-length sequences of either the filtered results or non-filtered results are then BLASTed back (second BLAST) against sequences from the organism from which the query sequence is derived (where the query sequence is SEQ ID NO: 826 or SEQ ID NO: 827, the second BLAST would therefore be against rice sequences). The results of the first and second BLASTs are then compared. A paralogue is identified if a high-ranking hit from the first blast is from the same species as from which the query sequence is derived, a BLAST back then ideally results in the query sequence amongst the highest hits; an orthologue is identified if a high-ranking hit in the first BLAST is not from the same species as from which the query sequence is derived, and preferably results upon BLAST back in the query sequence being among the highest hits.

[0286] High-ranking hits are those having a low E-value. The lower the E-value, the more significant the score (or in other words the lower the chance that the hit was found by chance). Computation of the E-value is well known in the art. In addition to E-values, comparisons are also scored by percentage identity. Percentage identity refers to the number of identical nucleotides (or amino acids) between the two compared nucleic acid (or polypeptide) sequences over a particular length. In the case of large families, ClustalW may be used, followed by a neighbour joining tree, to help visualize clustering of related genes and to identify orthologues and paralogues.

[0287] The task of protein subcellular localisation prediction is important and well studied. Knowing a protein's localisation helps elucidate its function. Experimental methods for protein localization range from immunolocalization to tagging of proteins using green fluorescent protein (GFP) or beta-glucuronidase (GUS). Such methods are accurate although labor-intensive compared with computational methods. Recently much progress has been made in computational prediction of protein localisation from sequence data. Among algorithms well known to a person skilled in the art are available at the ExPASy Proteomics tools hosted by the Swiss Institute for Bioinformatics, for example, PSort, TargetP, ChloroP, LocTree, Predotar, LipoP, MITOPROT, PATS, PTS1, SignalP, TMHMM, and others.

[0288] Nucleic acid variants may also be useful in practising the methods of the invention. Examples of such variants include nucleic acids encoding homologues and derivatives of any one of the amino acid sequences given in Table A1 to A5 of the Examples section, the terms “homologue” and “derivative” being as defined herein. Also useful in the methods of the invention are nucleic acids encoding homologues and derivatives of orthologues or paralogues of any one of the amino acid sequences given in Table A1 to A5 of the Examples section. Homologues and derivatives useful in the methods of the present invention have substantially the same biological and functional activity as the unmodified protein from which they are derived. Further variants useful in practising the methods of the invention are variants in which codon usage is optimised or in which miRNA target sites are removed.

[0289] Further nucleic acid variants useful in practising the methods of the invention include portions of nucleic acids encoding C3H-like polypeptides, or SPT polypeptides, or IDI2 polypeptides, or eIF4F-like protein complex subunits, or GR-RBP polypeptides, nucleic acids hybridising to nucleic acids encoding C3H-like polypeptides, or SPT polypeptides, or IDI2 polypeptides, or eIF4F-like protein complex subunits, or GR-RBP polypeptides, splice variants of nucleic acids encoding C3H-like polypeptides, or SPT polypeptides, or IDI2 polypeptides, or eIF4F-like protein complex subunits, or GR-RBP polypeptides, allelic variants of nucleic acids encoding C3H-like polypeptides, or SPT polypeptides, or IDI2 polypeptides, or eIF4F-like protein complex subunits, or GR-RBP polypeptides, and variants of nucleic acids encoding C3H-like polypeptides, or SPT polypeptides, or IDI2 polypeptides, or eIF4F-like protein complex subunits, or GR-RBP polypeptides, obtained by gene shuffling. The terms hybridising sequence, splice variant, allelic variant and gene shuffling are as described herein.

[0290] Nucleic acids encoding C3H-like polypeptides, or SPT polypeptides, or IDI2 polypeptides, or eIF4F-like protein complex subunits, or GR-RBP polypeptides, need not be full-length nucleic acids, since performance of the methods of the invention does not rely on the use of full-length nucleic acid sequences. According to the present invention, there is provided a method for enhancing yield-related traits in plants, comprising introducing and expressing in a plant a portion of any one of the nucleic acid sequences given in Table A1 to A5 of the Examples section, or a portion of a nucleic acid encoding an orthologue, paralogue or homologue of any of the amino acid sequences given in Table A1 to A5 of the Examples section.

[0291] A portion of a nucleic acid may be prepared, for example, by making one or more deletions to the nucleic acid. The portions may be used in isolated form or they may be fused to other coding (or non-coding) sequences in order to, for example, produce a protein that combines several activities. When fused to other coding sequences, the resultant polypeptide produced upon translation may be bigger than that predicted for the protein portion.

[0292] Concerning C3H-like polypeptides, portions useful in the methods of the invention, encode a C3H-like polypeptide as defined herein, and have substantially the same biological activity as the amino acid sequences given in Table A1 of the Examples section. Preferably, the portion is a portion of any one of the nucleic acids given in Table A1 of the Examples section, or is a portion of a nucleic acid encoding an orthologue or paralogue of any one of the amino acid sequences given in Table A1 of the Examples section. Preferably the portion is at least 500, 550, 600, 650, 700, 750, 800, 850, 900, 950, 1000, 1050, 1100, 1150, 1200, 1250, 1300, 1350, 1400, 1450, 1500 or more consecutive nucleotides in length, the consecutive nucleotides being of any one of the nucleic acid sequences given in Table A1 of the Examples section, or of a nucleic acid encoding an orthologue or paralogue of any one of the amino acid sequences given in Table A1 of the Examples section. Most preferably the portion is a portion of the nucleic acid of SEQ ID NO: 1. Preferably, the portion encodes a fragment of an amino acid sequence which, when used in the construction of a phylogenetic tree, such as the one depicted in FIG. 2, clusters with the group of C3H-like polypeptides comprising the amino acid sequence represented by SEQ ID NO: 2 rather than with any other group.

[0293] Concerning SPT-like polypeptides, portions useful in the methods of the invention, encode an SPT-like polypeptide as defined herein, and have substantially the same biological activity as the amino acid sequences given in Table A2 of the Examples section. Preferably, the portion is a portion of any one of the nucleic acids given in Table A2 of the Examples section, or is a portion of a nucleic acid encoding an orthologue or paralogue of any one of the amino acid sequences given in Table A2 of the Examples section. Preferably the portion is at least 500, 550, 600, 650, 700, 750, 800, 850, 900, 950, 1000, 1050, 1100, 1150, 1200, 1250, 1300, 1350, 1400, 1450, 1500 or more consecutive nucleotides in length, the consecutive nucleotides being of any one of the nucleic acid sequences given in Table A2 of the Examples section, or of a nucleic acid encoding an orthologue or paralogue of any one of the amino acid sequences given in Table A2 of the Examples section. Most preferably the portion is a portion of the nucleic acid of SEQ ID NO: 96. Preferably, the portion encodes a fragment of an amino acid sequence which, when used in the construction of a phylogenetic tree, such as the one depicted in FIG. 5, clusters with the group of SPT-like polypeptides comprising the amino acid sequence represented by SEQ ID NO: 97 rather than with any other group.

[0294] Concerning IDI2 polypeptides, portions useful in the methods of the invention, encode an IDI2 polypeptide as defined herein, and have substantially the same biological activity as the amino acid sequences given in Table A3 of the Examples section. Preferably, the portion is a portion of any one of the nucleic acids given in Table A3 of the Examples section, or is a portion of a nucleic acid encoding an orthologue or paralogue of any one of the amino acid sequences given in Table A3 of the Examples section. Preferably the portion is at least 500, 550, 600, 650, 700, 750, 800, 850, 900, 950, 1000, 1050, 1100, 1150, 1200, 1250, 1300, 1350, 1400, 1500, 1600, 1700, 1800, 1900, 2000, 2100, 2200, 2300, 2400, 2500, 2600 consecutive nucleotides in length, the consecutive nucleotides being of any one of the nucleic acid sequences given in Table A3 of the Examples section, or of a nucleic acid encoding an orthologue or paralogue of any one of the amino acid sequences given in Table A3 of the Examples section. Most preferably the portion is a portion of the nucleic acid of SEQ ID NO: 139. Preferably, the portion encodes a fragment of an amino acid sequence which, when used in the construction of a phylogenetic tree, such as the one depicted in FIG. 9, clusters with the A or B group rather than with any other group, more preferably the polypeptide sequence clusters with the A group of IDI2 polypeptides, which comprises the amino acid sequence represented by SEQ ID NO: 140.

[0295] Concerning eIF4F-like protein complex subunits, portions useful in the methods of the invention, encode an eIF4F-like protein complex subunits as defined herein, and have substantially the same biological activity as the amino acid sequences given in Tables A4 of the Examples section. Preferably, the portion is a portion of any one of the nucleic acids given in Tables A4 of the Examples section, or is a portion of a nucleic acid encoding an orthologue or paralogue of any one of the amino acid sequences given in Tables A4 of the Examples section. Preferably the portion is at least 500, 550, 600, 650, 700, 750, 800, 850, 900, 950, 1000 consecutive nucleotides in length, the consecutive nucleotides being of any one of the nucleic acid sequences given in Tables A4 of the Examples section, or of a nucleic acid encoding an orthologue or paralogue of any one of the amino acid sequences given in Tables A4 of the Examples section. Most preferably the portion is a portion of the nucleic acid of SEQ ID NO: 240, 300 or 560. Preferably, the portion encodes a fragment of an amino acid sequence which, when used in the construction of a phylogenetic tree, such as the one depicted in FIGS. 12, 13 and 14, clusters with the group of eIF4F-like subunit polypeptides comprising the amino acid sequence represented by SEQ ID NO: 241 rather than with any other group.

[0296] Concerning GR-RBP polypeptides, portions useful in the methods of the invention, encode a GR-RBP polypeptide as defined herein, and have substantially the same biological activity as the amino acid sequences given in Table A5 of the Examples section. Preferably, the portion is a portion of any one of the nucleic acids given in Table A5 of the Examples section, or is a portion of a nucleic acid encoding an orthologue or paralogue of any one of the amino acid sequences given in Table A5 of the Examples section. Preferably the portion is at least 300, 350, 400, 450, 500, 550, 600, 650, 700, 750, 800, 850, 900, 950, 1000, 1050, 1100, 1150, 1200, 1250, 1300, 1350, 1400, 1450, 1500 consecutive nucleotides in length, the consecutive nucleotides being of any one of the nucleic acid sequences given in Table A5 of the Examples section, or of a nucleic acid encoding an orthologue or paralogue of any one of the amino acid sequences given in Table A5 of the Examples section. Most preferably the portion is a portion of the nucleic acid of SEQ ID NO: 826. Preferably, the portion encodes a fragment of an amino acid sequence which, when used in the construction of a phylogenetic tree, such as the one depicted in FIG. 18 clusters with the A or B group rather than with any other group, more preferably with the A group of GR-RBP polypeptides, which comprises the amino acid sequence represented by SEQ ID NO: 827.

[0297] Another nucleic acid variant useful in the methods of the invention is a nucleic acid capable of hybridising, under reduced stringency conditions, preferably under stringent conditions, with a nucleic acid encoding a C3H-like polypeptide, or an SPT polypeptide, or an IDI2 polypeptide, or an eIF4F-like protein complex subunit, or a GR-RBP polypeptide, as defined herein, or with a portion as defined herein.

[0298] According to the present invention, there is provided a method for enhancing yield-related traits in plants, comprising introducing and expressing in a plant a nucleic acid capable of hybridizing to any one of the nucleic acids given in Table A1 to A5 of the Examples section, or comprising introducing and expressing in a plant a nucleic acid capable of hybridising to a nucleic acid encoding an orthologue, paralogue or homologue of any of the nucleic acid sequences given in Table A1 to AS of the Examples section.

[0299] Concerning C3H-like polypeptides, hybridising sequences useful in the methods of the invention encode a C3H-like polypeptide as defined herein, having substantially the same biological activity as the amino acid sequences given in Table A1 of the Examples section. Preferably, the hybridising sequence is capable of hybridising to the complement of any one of the nucleic acids given in Table A1 of the Examples section, or to a portion of any of these sequences, a portion being as defined above, or the hybridising sequence is capable of hybridising to the complement of a nucleic acid encoding an orthologue or paralogue of any one of the amino acid sequences given in Table A1 of the Examples section. Most preferably, the hybridising sequence is capable of hybridising to the complement of a nucleic acid as represented by SEQ ID NO: 1 or to a portion thereof.

[0300] Preferably, the hybridising sequence encodes a polypeptide with an amino acid sequence which, when full-length and used in the construction of a phylogenetic tree, such as the one depicted in FIG. 2, clusters with the group of C3H-like polypeptides comprising the amino acid sequence represented by SEQ ID NO: 2 rather than with any other group.

[0301] Concerning SPT-like polypeptides, hybridising sequences useful in the methods of the invention encode an SPT-like polypeptide as defined herein, having substantially the same biological activity as the amino acid sequences given in Table A2 of the Examples section. Preferably, the hybridising sequence is capable of hybridising to the complement of any one of the nucleic acids given in Table A2 of the Examples section, or to a portion of any of these sequences, a portion being as defined above, or the hybridising sequence is capable of hybridising to the complement of a nucleic acid encoding an orthologue or paralogue of any one of the amino acid sequences given in Table A2 of the Examples section. Most preferably, the hybridising sequence is capable of hybridising to the complement of a nucleic acid as represented by SEQ ID NO:96 or to a portion thereof.

[0302] Preferably, the hybridising sequence encodes a polypeptide with an amino acid sequence which, when full-length and used in the construction of a phylogenetic tree, such as the one depicted in FIG. 5, clusters with the group of SPT-like polypeptides comprising the amino acid sequence represented by SEQ ID NO: 97 rather than with any other group.

[0303] Concerning ID2 polypeptides, hybridising sequences useful in the methods of the invention encode an IDI2 polypeptide as defined herein, having substantially the same biological activity as the amino acid sequences given in Table A3 of the Examples section. Preferably, the hybridising sequence is capable of hybridising to the complement of any one of the nucleic acids given in Table A3 of the Examples section, or to a portion of any of these sequences, a portion being as defined above, or the hybridising sequence is capable of hybridising to the complement of a nucleic acid encoding an orthologue or paralogue of any one of the amino acid sequences given in Table A3 of the Examples section. Most preferably, the hybridising sequence is capable of hybridising to the complement of a nucleic acid as represented by SEQ ID NO: 139 or to a portion thereof.

[0304] Preferably, the hybridising sequence encodes a polypeptide with an amino acid sequence which, when full-length and used in the construction of a phylogenetic tree, such as the one depicted in FIG. 9, clusters with the A or B group rather than with any other group, more preferably the polypeptide sequence clusters with the A group of IDI2 polypeptides, which comprises the amino acid sequence represented by SEQ ID NO: 140.

[0305] Concerning eIF4F-like protein complex subunits, hybridising sequences useful in the methods of the invention encode at least an eIF4F-like protein complex subunit as defined herein, having substantially the same biological activity as the amino acid sequences given in Tables A4 of the Examples section. Preferably, the hybridising sequence is capable of hybridising to the complement of any one of the nucleic acids given in Tables A4 of the Examples section, or to a portion of any of these sequences, a portion being as defined above, or the hybridising sequence is capable of hybridising to the complement of a nucleic acid encoding an orthologue or paralogue of any one of the amino acid sequences given in Tables A4 of the Examples section. Most preferably, the hybridising sequence is capable of hybridising to the complement of a nucleic acid as represented by SEQ ID NO: 240, SEQ ID NO 300 or SEQ ID NO: 560 and, in a further preferable embodiment of the present invention, the hybridising sequence is capable of hybridising to the complement of a nucleic acid as represented by SEQ ID NO: 240 or to any portion thereof.

[0306] Preferably, the hybridising sequence encodes at least a polypeptide with an amino acid sequence which, when full-length and used in the construction of a phylogenetic tree, such as the one depicted in FIGS. 12, 13 and 14, clusters with the group of eIF4F-like protein complex subunits comprising the amino acid sequence represented by SEQ ID NO: 241, SEQ ID NO: 301 or SEQ ID NO: 561, and most preferably the amino acid sequence represented by SEQ ID NO: 241, rather than with any other group.

[0307] Concerning GR-RBP polypeptides, hybridising sequences useful in the methods of the invention encode a GR-RBP polypeptide as defined herein, having substantially the same biological activity as the amino acid sequences given in Table A5 of the Examples section. Preferably, the hybridising sequence is capable of hybridising to the complement of any one of the nucleic acids given in Table A5 of the Examples section, or to a portion of any of these sequences, a portion being as defined above, or the hybridising sequence is capable of hybridising to the complement of a nucleic acid encoding an orthologue or paralogue of any one of the amino acid sequences given in Table A5 of the Examples section. Most preferably, the hybridising sequence is capable of hybridising to the complement of a nucleic acid as represented by SEQ ID NO: 826 or to a portion thereof.

[0308] Preferably, the hybridising sequence encodes a polypeptide with an amino acid sequence which, when full-length and when used in the construction of a phylogenetic tree, such as the one depicted in FIG. 18 clusters with the A or B group rather than with any other group, more preferably with the A group of GR-RBP polypeptides, which comprises the amino acid sequence represented by SEQ ID NO: 827.

[0309] Concerning C3H-like polypeptides, or SPT polypeptides, or IDI2 polypeptides, or GR-RBP polypeptides, another nucleic acid variant useful in the methods of the invention is a splice variant encoding a C3H-like polypeptide, or an SPT polypeptide, or an IDI2 polypeptide, or a GR-RBP polypeptide, as defined hereinabove, a splice variant being as defined herein.

[0310] Concerning eIF4F-like protein complex subunits, another nucleic acid variant useful in the methods of the invention is a splice variant at least encoding an eIF4F-like protein complex subunit as defined hereinabove, a splice variant being as defined herein.

[0311] Concerning C3H-like polypeptides, or SPT polypeptides, or IDI2 polypeptides, or GR-RBP polypeptides, according to the present invention, there is provided a method for enhancing yield-related traits in plants, comprising introducing and expressing in a plant a splice variant of any one of the nucleic acid sequences given in Table A1, or Table A2, or Table A3 or Table A5, of the Examples section, or a splice variant of a nucleic acid encoding an orthologue, paralogue or homologue of any of the amino acid sequences given in Table A1, or Table A2, or Table A3 or Table A5, of the Examples section.

[0312] Concerning eIF4F-like protein complex subunits, according to the present invention, there is provided a method for enhancing yield-related traits in plants, comprising introducing and expressing in a plant a splice variant of at least one of the nucleic acid sequences given in Tables A4 of the Examples section, or at least one a splice variant of a nucleic acid encoding an orthologue, paralogue or homologue of at least one of the amino acid sequences given in Tables A4 of the Examples section.

[0313] Concerning C3H-like polypeptides, preferred splice variants are splice variants of a nucleic acid represented by SEQ ID NO: 1, or a splice variant of a nucleic acid encoding an orthologue or paralogue of SEQ ID NO: 2. Preferably, the amino acid sequence encoded by the splice variant, when used in the construction of a phylogenetic tree, such as the one depicted in FIG. 2, clusters with the group of C3H-like polypeptides comprising the amino acid sequence represented by SEQ ID NO: 2 rather than with any other group.

[0314] Concerning SPT polypeptides, preferred splice variants are splice variants of a nucleic acid represented by SEQ ID NO: 96, or a splice variant of a nucleic acid encoding an orthologue or paralogue of SEQ ID NO: 97. Preferably, the amino acid sequence encoded by the splice variant, when used in the construction of a phylogenetic tree, such as the one depicted in FIG. 5, clusters with the group of SPT-like polypeptides comprising the amino acid sequence represented by SEQ ID NO: 97 rather than with any other group.

[0315] Concerning IDI2 polypeptides, preferred splice variants are splice variants of a nucleic acid represented by SEQ ID NO: 139, or a splice variant of a nucleic acid encoding an orthologue or paralogue of SEQ ID NO: 140. Preferably, the amino acid sequence encoded by the splice variant, when used in the construction of a phylogenetic tree, such as the one depicted in FIG. 9, clusters with the A or B group rather than with any other group, more preferably the polypeptide sequence clusters with the A group of IDI2 polypeptides, which comprises the amino acid sequence represented by SEQ ID NO: 140.

[0316] Concerning eIF4F-like protein complex subunits, preferred splice variants are splice variants of a nucleic acid represented by SEQ ID NO: 240, SEQ ID NO: 300 and/or SEQ ID NO: 560, or a splice variant of a nucleic acid encoding an orthologue or paralogue of S SEQ ID NO: 241, SEQ ID NO: 301 or SEQ ID NO: 561. Preferably, the amino acid sequence encoded by the splice variant, when used in the construction of a phylogenetic tree, such as the one depicted in FIGS. 12, 13 and/or 14, clusters with at least one of the group of eIF4F-like protein complex subunit, such as eIF4 isoG/G, eIF4A or eIF4E/isoE comprising at least one amino acid sequence represented by SEQ ID NO: 241, SEQ ID NO: 301 or SEQ ID NO: 561, most preferably the amino acid sequence represented by SEQ ID NO: 241, rather than with any other group.

[0317] Concerning GR-RBP polypeptides, preferred splice variants are splice variants of a nucleic acid represented by SEQ ID NO: 826, or a splice variant of a nucleic acid encoding an orthologue or paralogue of SEQ ID NO: 827. Preferably, the amino acid sequence encoded by the splice variant, when used in the construction of a phylogenetic tree, such as the one depicted in FIG. 18 clusters with the A or B group rather than with any other group, more preferably with the A group of GR-RBP polypeptides, which comprises the amino acid sequence represented by SEQ ID NO: 826.

[0318] Another nucleic acid variant useful in performing the methods of the invention is an allelic variant of a nucleic acid encoding a C3H-like polypeptide, or an SPT polypeptide, or an IDI2 polypeptide, or an eIF4F-like protein complex subunit, or a GR-RBP polypeptide, as defined hereinabove, an allelic variant being as defined herein.

[0319] According to the present invention, there is provided a method for enhancing yield-related traits in plants, comprising introducing and expressing in a plant an allelic variant of any one of the nucleic acids given in Table A1 to A5 of the Examples section, or comprising introducing and expressing in a plant an allelic variant of a nucleic acid encoding an orthologue, paralogue or homologue of any of the amino acid sequences given in Table A1 to A5 of the Examples section.

[0320] Concerning C3H-like polypeptides, the polypeptides encoded by allelic variants useful in the methods of the present invention have substantially the same biological activity as the C3H-like polypeptide of SEQ ID NO: 2 and any of the amino acids depicted in Table A1 of the Examples section. Allelic variants exist in nature, and encompassed within the methods of the present invention is the use of these natural alleles. Preferably, the allelic variant is an allelic variant of SEQ ID NO: 1 or an allelic variant of a nucleic acid encoding an orthologue or paralogue of SEQ ID NO: 2. Preferably, the amino acid sequence encoded by the allelic variant, when used in the construction of a phylogenetic tree, such as the one depicted in FIG. 2, clusters with the C3H-like polypeptides comprising the amino acid sequence represented by SEQ ID NO: 2 rather than with any other group.

[0321] Concerning SPT polypeptides, the polypeptides encoded by allelic variants useful in the methods of the present invention have substantially the same biological activity as the SPT-like polypeptide of SEQ ID NO: 97 and any of the amino acids depicted in Table A2 of the Examples section. Allelic variants exist in nature, and encompassed within the methods of the present invention is the use of these natural alleles. Preferably, the allelic variant is an allelic variant of SEQ ID NO: 96 or an allelic variant of a nucleic acid encoding an orthologue or paralogue of SEQ ID NO: 97. Preferably, the amino acid sequence encoded by the allelic variant, when used in the construction of a phylogenetic tree, such as the one depicted in FIG. 5, clusters with the SPT-like polypeptides comprising the amino acid sequence represented by SEQ ID NO: 97 rather than with any other group.

[0322] Concerning IDI2 polypeptides, the polypeptides encoded by allelic variants useful in the methods of the present invention have substantially the same biological activity as the IDI2 polypeptide of SEQ ID NO: 140 and any of the amino acids depicted in Table A3 of the Examples section. Allelic variants exist in nature, and encompassed within the methods of the present invention is the use of these natural alleles. Preferably, the allelic variant is an allelic variant of SEQ ID NO: 139 or an allelic variant of a nucleic acid encoding an orthologue or paralogue of SEQ ID NO: 140. Preferably, the amino acid sequence encoded by the allelic variant, when used in the construction of a phylogenetic tree, such as the one depicted in FIG. 3, clusters with the A or B group rather than with any other group, more preferably the polypeptide sequence clusters with the A group of IDI2 polypeptides, which comprises the amino acid sequence represented by SEQ ID NO: 140.

[0323] Concerning eIF4F-like protein complex subunits, the polypeptides encoded by allelic variants useful in the methods of the present invention have substantially the same biological activity as the eIF4F-like protein complex subunits of anyone of the sequences represented by SEQ ID NO: 241, SEQ ID NO: 301 or SEQ ID NO: 561 and any of the amino acids depicted in Tables A4 of the Examples section. Allelic variants exist in nature, and encompassed within the methods of the present invention is the use of these natural alleles. Preferably, the allelic variant is an allelic variant of SEQ ID NO: 240, SEQ ID NO: 300 and/or SEQ ID NO: 560 or an allelic variant of a nucleic acid encoding an orthologue or paralogue of SEQ ID NO: 241, SEQ ID NO: 301 and/or SEQ ID NO: 561. Preferably, the amino acid sequence encoded by the allelic variant, when used in the construction of a phylogenetic tree, such as the one depicted in FIGS. 12, 13 and/or 14, clusters with the eIF4F-like protein complex subunits, such as eIF4 isoG/G, eIF4A or eIF4E/isoE, comprising the amino acid sequence represented by SEQ ID NO: 241 rather than with any other group.

[0324] Concerning GR-RBP polypeptides, the polypeptides encoded by allelic variants useful in the methods of the present invention have substantially the same biological activity as the GR-RBP polypeptide of SEQ ID NO: 827 and any of the amino acids depicted in Table A5 of the Examples section. Allelic variants exist in nature, and encompassed within the methods of the present invention is the use of these natural alleles. Preferably, the allelic variant is an allelic variant of SEQ ID NO: 826 or an allelic variant of a nucleic acid encoding an orthologue or paralogue of SEQ ID NO: 827. Preferably, the amino acid sequence encoded by the allelic variant, when used in the construction of a phylogenetic tree, such as the one depicted in FIG. 18 clusters with the A or B group rather than with any other group, more preferably with the A group of GR-RBP polypeptides, which comprises the amino acid sequence represented by SEQ ID NO: 827.

[0325] Gene shuffling or directed evolution may also be used to generate variants of nucleic acids encoding C3H-like polypeptides, or SPT polypeptides, or IDI2 polypeptides, or eIF4F-like protein complex subunits, or GR-RBP polypeptides, as defined above; the term “gene shuffling” being as defined herein.

[0326] According to the present invention, there is provided a method for enhancing yield-related traits in plants, comprising introducing and expressing in a plant a variant of any one of the nucleic acid sequences given in Table A1 to A5 of the Examples section, or comprising introducing and expressing in a plant a variant of a nucleic acid encoding an orthologue, paralogue or homologue of any of the amino acid sequences given in Table A1 to A5 of the Examples section, which variant nucleic acid is obtained by gene shuffling.

[0327] Concerning C3H-like polypeptides, preferably, the amino acid sequence encoded by the variant nucleic acid obtained by gene shuffling, when used in the construction of a phylogenetic tree such as the one depicted in FIG. 2, clusters with the group of C3H-like polypeptides comprising the amino acid sequence represented by SEQ ID NO: 2 rather than with any other group.

[0328] Concerning SPT polypeptides, preferably, the amino acid sequence encoded by the variant nucleic acid obtained by gene shuffling, when used in the construction of a phylogenetic tree such as the one depicted in FIG. 5, clusters with the group of SPT-like polypeptides comprising the amino acid sequence represented by SEQ ID NO: 97 rather than with any other group.

[0329] Concerning IDI2 polypeptides, preferably, the amino acid sequence encoded by the variant nucleic acid obtained by gene shuffling, when used in the construction of a phylogenetic tree such as the one depicted in FIG. 9, clusters with the A or B group rather than with any other group, more preferably the polypeptide sequence clusters with the A group of IDI2 polypeptides, which comprises the amino acid sequence represented by SEQ ID NO: 140.

[0330] Concerning eIF4F-like protein complex subunits, preferably, the amino acid sequence encoded by the variant nucleic acid obtained by gene shuffling, when used in the construction of a phylogenetic tree such as the one depicted in FIGS. 12, 13 and/or 14, clusters with the group of eIF4F-like protein complex subunit comprising the amino acid sequence represented by SEQ ID NO: 241, SEQ ID NO: 301 and/or SEQ ID NO: 561, most preferably clusters with the group of eIF4F-like protein complex subunit comprising the amino acid sequence represented by SEQ ID NO: 241, rather than with any other group.

[0331] Concerning GR-RBP polypeptides, preferably, the amino acid sequence encoded by the variant nucleic acid obtained by gene shuffling, when used in the construction of a phylogenetic tree, such as the one depicted in FIG. 18 clusters with the A or B group rather than with any other group, more preferably with the A group of GR-RBP polypeptides, which comprises the amino acid sequence represented by SEQ ID NO: 827.

[0332] Furthermore, nucleic acid variants may also be obtained by site-directed mutagenesis. Several methods are available to achieve site-directed mutagenesis, the most common being PCR based methods (Current Protocols in Molecular Biology. Wiley Eds.).

[0333] Nucleic acids encoding C3H-like polypeptides may be derived from any natural or artificial source. The nucleic acid may be modified from its native form in composition and/or genomic environment through deliberate human manipulation. Preferably the C3H-like polypeptide-encoding nucleic acid is from a plant, preferably from the family Medicago, most preferably the nucleic acid is from Medicago truncatula.

[0334] Nucleic acids encoding SPT-like polypeptides may be derived from any natural or artificial source. The nucleic acid may be modified from its native form in composition and/or genomic environment through deliberate human manipulation. Preferably the SPT-like polypeptide-encoding nucleic acid is from a plant, further preferably from the family Salicaceae, preferably from the genus Populus, most preferably the nucleic acid is from Populus trichocarpa.

[0335] Nucleic acids encoding IDI2 polypeptides may be derived from any natural or artificial source. The nucleic acid may be modified from its native form in composition and/or genomic environment through deliberate human manipulation. Preferably the IDI2 polypeptide-encoding nucleic acid is from a plant, further preferably from a monocotyledonous plant, more preferably from the family Poaceae, most preferably the nucleic acid is from Saccharum officinarum.

[0336] Nucleic acids encoding eIF4F-like protein complex subunit may be derived from any natural or artificial source. The nucleic acids may be modified from its native form in composition and/or genomic environment through deliberate human manipulation. Preferably the eIF4F-like protein complex subunits encoding nucleic acids are from a plant, further preferably from a monocotyledonous plant, more preferably from the family Poaceae, most preferably the nucleic acid is from Oryza sativa.

[0337] Nucleic acids encoding GR-RBP polypeptides may be derived from any natural or artificial source. The nucleic acid may be modified from its native form in composition and/or genomic environment through deliberate human manipulation. Preferably the GR-RBP polypeptide-encoding nucleic acid is from a plant, further preferably from a monocotyledonous plant, more preferably from the family Poaceae, most preferably the nucleic acid is from Oryza sativa.

[0338] Concerning C3H-like polypeptides, or SPT polypeptides, or eIF4F-like protein complex subunits, performance of the methods of the invention gives plants having enhanced yield-related traits. In particular performance of the methods of the invention gives plants having increased yield, especially increased seed yield relative to control plants. The terms “yield” and “seed yield” are described in more detail in the “definitions” section herein.

[0339] Concerning IDI2 polypeptides, or GR-RBP polypeptides, performance of the methods of the invention gives plants having enhanced yield-related traits. In particular performance of the methods of the invention gives plants having increased yield, especially increased seed yield, increased biomass and/or increased early vigour, relative to control plants. The terms “yield” and “seed yield” and “early vigour” are described in more detail in the “definitions” section herein.

[0340] Concerning C3H-like polypeptides, or SPT polypeptides, or eIF4F-like protein complex subunits, reference herein to enhanced yield-related traits is taken to mean an increase in biomass (weight) of one or more parts of a plant, which may include aboveground (harvestable) parts and/or (harvestable) parts below ground. In particular, such harvestable parts are seeds, and performance of the methods of the invention results in plants having increased seed yield relative to the seed yield of control plants.

[0341] Concerning IDI2 polypeptides, reference herein to enhanced yield-related traits is taken to mean an increase in biomass (weight) of one or more parts of a plant, which may include aboveground (harvestable) parts and/or (harvestable) parts below ground. In particular, such harvestable parts are seeds, above-ground biomass and/or roots, and performance of the methods of the invention results in plants having increased early vigour, increased seed yield, and/or increased biomass relative to control plants.

[0342] Concerning GR-RBP polypeptides, Reference herein to enhanced yield-related traits is taken to mean an increase in biomass (weight) of one or more parts of a plant, which may include aboveground (harvestable) parts and/or (harvestable) parts below ground. In particular, such harvestable parts are seeds and/or roots, and performance of the methods of the invention results in plants having increased seed yield relative to the seed yield of control plants and/or enhanced root growth, compared to control plants.

[0343] Taking corn as an example, a yield increase may be manifested as one or more of the following: increase in the number of plants established per square meter, an increase in the number of ears per plant, an increase in the number of rows, number of kernels per row, kernel weight, thousand kernel weight, ear length/diameter, increase in the seed filling rate (which is the number of filled seeds divided by the total number of seeds and multiplied by 100), among others.

[0344] Taking rice as an example, a yield increase may manifest itself as an increase in one or more of the following: number of plants per square meter, number of panicles per plant, panicle length, number of spikelets per panicle, number of flowers (florets) per panicle (which is expressed as a ratio of the number of filled seeds over the number of primary panicles), increase in the seed filling rate (which is the number of filled seeds divided by the total number of seeds and multiplied by 100), increase in thousand kernel weight, among others. In rice, submergence tolerance may also result in increased yield.

[0345] The present invention provides a method for increasing yield, especially seed yield of plants, relative to control plants, which method comprises modulating expression in a plant of a nucleic acid encoding a C3H-like polypeptide, or an SPT-like polypeptide, or an IDI2 polypeptide, as defined herein.

[0346] The present invention also provides a method for increasing yield, especially seed yield of plants, relative to control plants, which method comprises modulating the activity in a plant of an eIF4F-like protein complex by modulating the expression of at least one of its subunits nucleic acid encoding polypeptides as defined herein.

[0347] The present invention also provides a method for increasing yield, especially seed yield and/or root yield of plants, relative to control plants, which method comprises modulating expression in a plant of a nucleic acid encoding a GR-RBP polypeptide as defined herein.

[0348] Since the transgenic plants according to the present invention have increased yield, it is likely that these plants exhibit an increased growth rate (during at least part of their life cycle), relative to the growth rate of control plants at a corresponding stage in their life cycle.

[0349] The increased growth rate may be specific to one or more parts of a plant (including seeds), or may be throughout substantially the whole plant. Plants having an increased growth rate may have a shorter life cycle. The life cycle of a plant may be taken to mean the time needed to grow from a dry mature seed up to the stage where the plant has produced dry mature seeds, similar to the starting material. This life cycle may be influenced by factors such as speed of germination, early vigour, growth rate, greenness index, flowering time and speed of seed maturation. The increase in growth rate may take place at one or more stages in the life cycle of a plant or during substantially the whole plant life cycle. Increased growth rate during the early stages in the life cycle of a plant may reflect enhanced vigour. The increase in growth rate may alter the harvest cycle of a plant allowing plants to be sown later and/or harvested sooner than would otherwise be possible (a similar effect may be obtained with earlier flowering time). If the growth rate is sufficiently increased, it may allow for the further sowing of seeds of the same plant species (for example sowing and harvesting of rice plants followed by sowing and harvesting of further rice plants all within one conventional growing period). Similarly, if the growth rate is sufficiently increased, it may allow for the further sowing of seeds of different plants species (for example the sowing and harvesting of corn plants followed by, for example, the sowing and optional harvesting of soybean, potato or any other suitable plant). Harvesting additional times from the same rootstock in the case of some crop plants may also be possible. Altering the harvest cycle of a plant may lead to an increase in annual biomass production per square meter (due to an increase in the number of times (say in a year) that any particular plant may be grown and harvested). An increase in growth rate may also allow for the cultivation of transgenic plants in a wider geographical area than their wild-type counterparts, since the territorial limitations for growing a crop are often determined by adverse environmental conditions either at the time of planting (early season) or at the time of harvesting (late season). Such adverse conditions may be avoided if the harvest cycle is shortened. The growth rate may be determined by deriving various parameters from growth curves, such parameters may be: T-Mid (the time taken for plants to reach 50% of their maximal size) and T-90 (time taken for plants to reach 90% of their maximal size), amongst others.

[0350] Concerning C3H-like polypeptides, or SPT polypeptides, or IDI2 polypeptides, or GR-RBP polypeptides, according to a preferred feature of the present invention, performance of the methods of the invention gives plants having an increased growth rate relative to control plants. Therefore, according to the present invention, there is provided a method for increasing the growth rate of plants, which method comprises modulating expression in a plant of a nucleic acid encoding a C3H-like polypeptide, or an SPT polypeptide, or an IDI2 polypeptide, or an eIF4F-like protein complex, or a GR-RBP polypeptide, as defined herein.

[0351] Concerning eIF4F-like protein complex subunits, according to a preferred feature of the present invention, performance of the methods of the invention gives plants having an increased growth rate relative to control plants. Therefore, according to the present invention, there is provided a method for increasing the growth rate of plants, which method comprises modulating the activity of an eIF4F-like protein complex, in a plant, by modulating and expressing at least a nucleic acid encoding for its subunits polypeptide as defined herein.

[0352] An increase in yield and/or growth rate occurs whether the plant is under non-stress conditions or whether the plant is exposed to various stresses compared to control plants. Plants typically respond to exposure to stress by growing more slowly. In conditions of severe stress, the plant may even stop growing altogether. Mild stress on the other hand is defined herein as being any stress to which a plant is exposed which does not result in the plant ceasing to grow altogether without the capacity to resume growth. Mild stress in the sense of the invention leads to a reduction in the growth of the stressed plants of less than 40%, 35%, 30% or 25%, more preferably less than 20% or 15% in comparison to the control plant under non-stress conditions. Due to advances in agricultural practices (irrigation, fertilization, pesticide treatments) severe stresses are not often encountered in cultivated crop plants. As a consequence, the compromised growth induced by mild stress is often an undesirable feature for agriculture. Mild stresses are the everyday biotic and/or abiotic (environmental) stresses to which a plant is exposed. Abiotic stresses may be due to drought or excess water, anaerobic stress, salt stress, chemical toxicity, oxidative stress and hot, cold or freezing temperatures. The abiotic stress may be an osmotic stress caused by a water stress (particularly due to drought), salt stress, oxidative stress or an ionic stress. Biotic stresses are typically those stresses caused by pathogens, such as bacteria, viruses, fungi, nematodes and insects. Biotic stresses are typically those stresses caused by pathogens, such as bacteria, viruses, fungi, nematodes, and insects. The term “non-stress” conditions as used herein are those environmental conditions that allow optimal growth of plants. Persons skilled in the art are aware of normal soil conditions and climatic conditions for a given location. The term non-stress conditions as used herein, encompasses the occasional or everyday mild stresses to which a plant is exposed, as defined herein, but does not encompass severe stresses.

[0353] In particular, the methods of the present invention may be performed under non-stress conditions or under conditions of mild drought to give plants having increased yield relative to control plants. As reported in Wang et al. (Planta (2003) 218: 1-14), abiotic stress leads to a series of morphological, physiological, biochemical and molecular changes that adversely affect plant growth and productivity. Drought, salinity, extreme temperatures and oxidative stress are known to be interconnected and may induce growth and cellular damage through similar mechanisms. Rabbani et al. (Plant Physiol (2003) 133: 1755-1767) describes a particularly high degree of “cross talk” between drought stress and high-salinity stress. For example, drought and/or salinisation are manifested primarily as osmotic stress, resulting in the disruption of homeostasis and ion distribution in the cell. Oxidative stress, which frequently accompanies high or low temperature, salinity or drought stress, may cause denaturing of functional and structural proteins. As a consequence, these diverse environmental stresses often activate similar cell signalling pathways and cellular responses, such as the production of stress proteins, up-regulation of anti-oxidants, accumulation of compatible solutes and growth arrest. The term “non-stress” conditions as used herein are those environmental conditions that allow optimal growth of plants. Persons skilled in the art are aware of normal soil conditions and climatic conditions for a given location. Plants with optimal growth conditions, (grown under non-stress conditions) typically yield in increasing order of preference at least 97%, 95%, 92%, 90%, 87%, 85%, 83%, 80%, 77% or 75% of the average production of such plant in a given environment. Average production may be calculated on harvest and/or season basis. Persons skilled in the art are aware of average yield productions of a crop.

[0354] Concerning C3H-like polypeptides, or SPT polypeptides, or IDI2 polypeptides, or GR-RBP polypeptides, performance of the methods of the invention gives plants grown under non-stress conditions or under mild drought conditions increased yield relative to control plants grown under comparable conditions. Therefore, according to the present invention, there is provided a method for increasing yield in plants grown under non-stress conditions or under mild drought conditions, which method comprises modulating expression in a plant of a nucleic acid encoding a C3H-like polypeptide, or an SPT polypeptide, or an IDI2 polypeptide, or a GR-RBP polypeptide.

[0355] Concerning eIF4F-like protein complex subunits, performance of the methods of the invention gives plants grown under non-stress conditions or under mild drought conditions increased yield relative to control plants grown under comparable conditions. Therefore, according to the present invention, there is provided a method for increasing yield in plants grown under non-stress conditions or under mild drought conditions, which method comprises modulating the activity in a plant of an eIF4F-like protein complex by modulating and expressing at least one of its subunits nucleic acid encoding polypeptide.

[0356] Concerning C3H-like polypeptides, or SPT polypeptides, or IDI2 polypeptides, or GR-RBP polypeptides, performance of the methods of the invention gives plants grown under conditions of nutrient deficiency, particularly under conditions of nitrogen deficiency, increased yield relative to control plants grown under comparable conditions. Therefore, according to the present invention, there is provided a method for increasing yield in plants grown under conditions of nutrient deficiency, which method comprises modulating expression in a plant of a nucleic acid encoding a C3H-like polypeptide, or an SPT polypeptide, or an IDI2 polypeptide, or an eIF4F-like protein complex, or a GR-RBP polypeptide. Nutrient deficiency may result from a lack of nutrients such as nitrogen, phosphates and other phosphorous-containing compounds, potassium, calcium, magnesium, manganese, iron and boron, amongst others. Concerning IDI2 polypeptides, the nutrient deficiency is preferably a deficiency in nitrogen.

[0357] Concerning eIF4F-like protein complex subunits, performance of the methods of the invention gives plants grown under conditions of nutrient deficiency, particularly under conditions of nitrogen deficiency, increased yield relative to control plants grown under comparable conditions. Therefore, according to the present invention, there is provided a method for increasing yield in plants grown under conditions of nutrient deficiency, which method comprises modulating activity of an eIF4F-like protein complex by modulating and expressing at least one of its subunits nucleic acid encoding polypeptide. Nutrient deficiency may result from a lack of nutrients such as nitrogen, phosphates and other phosphorous-containing compounds, potassium, calcium, magnesium, manganese, iron and boron, amongst others.

[0358] Performance of the methods of the invention gives plants grown under conditions of salt stress, increased yield relative to control plants grown under comparable conditions. Therefore, according to the present invention, there is provided a method for increasing yield in plants grown under conditions of salt stress, which method comprises modulating expression in a plant of a nucleic acid encoding a C3H-like polypeptide. The term salt stress is not restricted to common salt (NaCl), but may be any one or more of: NaCl, KCl, LiCl, MgCl₂, CaCl₂, amongst others.

[0359] The present invention encompasses plants or parts thereof (including seeds) obtainable by the methods according to the present invention. The plants or parts thereof comprise a nucleic acid transgene encoding a C3H-like polypeptide, or an SPT polypeptide, or an IDI2 polypeptide, or an eIF4F-like protein complex subunit, or a GR-RBP polypeptide, as defined above.

[0360] Concerning C3H-like polypeptides, or SPT polypeptides, or IDI2 polypeptides, or eIF4F-like protein complex subunits, or GR-RBP polypeptides, the invention also provides genetic constructs and vectors to facilitate introduction and/or expression in plants of nucleic acids encoding C3H-like polypeptides, or SPT polypeptides, or IDI2 polypeptides, or eIF4F-like protein complex subunits, or GR-RBP polypeptides. The gene constructs may be inserted into vectors, which may be commercially available, suitable for transforming into plants and suitable for expression of the gene of interest in the transformed cells. The invention also provides use of a gene construct as defined herein in the methods of the invention.

[0361] Concerning eIF4F-like protein complex subunits, the invention also provides genetic constructs and vectors to facilitate introduction and/or expression in plants of at least one nucleic acid encoding eIF4F-like protein complex subunit polypeptides. The gene constructs may be inserted into vectors, which may be commercially available, suitable for transforming into plants and suitable for expression of the gene of interest in the transformed cells. The invention also provides use of a gene construct as defined herein in the methods of the invention.

[0362] More specifically, the present invention provides a construct comprising:
[0363] (a) a nucleic acid encoding a C3H-like polypeptide, or an SPT polypeptide, or an IDI2 polypeptide, or a GR-RBP polypeptide, or at least a nucleic acid encoding an eIF4F-like protein complex subunit polypeptide as defined above;
[0364] (b) one or more control sequences capable of driving expression of the nucleic acid sequence of (a); and optionally
[0365] (c) a transcription termination sequence.

[0366] Concerning C3H-like polypeptides, or SPT polypeptides, or IDI2 polypeptides, or GR-RBP polypeptides, the nucleic acid encoding a C3H-like polypeptide, or an SPT polypeptide, or an IDI2 polypeptide, or a GR-RBP polypeptide, is preferably as defined above. Concerning eIF4F-like protein complex subunits, the nucleic acid encoding an eIF4F-like protein complex subunit is preferably at least of the subunit polypeptide as defined above. The term “control sequence” and “termination sequence” are as defined herein.

[0367] Plants are transformed with a vector comprising any of the nucleic acids described above. The skilled artisan is well aware of the genetic elements that must be present on the vector in order to successfully transform, select and propagate host cells containing the sequence of interest. The sequence of interest is operably linked to one or more control sequences (at least to a promoter).

[0368] Advantageously, any type of promoter, whether natural or synthetic, may be used to drive expression of the nucleic acid sequence, but preferably the promoter is of plant origin. A constitutive promoter is particularly useful in the methods. Preferably the constitutive promoter is also a ubiquitous promoter, or a ubiquitous promoter of medium strength. See the “Definitions” section herein for definitions of the various promoter types.

[0369] Concerning C3H-like polypeptides, it should be clear that the applicability of the present invention is not restricted to the C3H-like polypeptide-encoding nucleic acid represented by SEQ ID NO: 1, nor is the applicability of the invention restricted to expression of a C3H-like polypeptide-encoding nucleic acid when driven by a constitutive promoter.

[0370] The constitutive promoter is preferably a medium strength promoter, more preferably selected from a plant derived promoter, such as a GOS2 promoter, more preferably is the promoter GOS2 promoter from rice. Further preferably the constitutive promoter is represented by a nucleic acid sequence substantially similar to SEQ ID NO: 95, most preferably the constitutive promoter is as represented by SEQ ID NO: 95. See the “Definitions” section herein for further examples of constitutive promoters.

[0371] Optionally, one or more terminator sequences may be used in the construct introduced into a plant. Preferably, the construct comprises an expression cassette comprising a GOS2 promoter, substantially similar to SEQ ID NO: 95, and the nucleic acid encoding the C3H-like polypeptide.

[0372] Concerning SPT polypeptides, it should be clear that the applicability of the present invention is not restricted to the S PT-like polypeptide-encoding nucleic acid represented by SEQ ID NO: 96, nor is the applicability of the invention restricted to expression of an SPT-like polypeptide-encoding nucleic acid when driven by a constitutive promoter.

[0373] The constitutive promoter is preferably a medium strength promoter, more preferably selected from a plant derived promoter, such as a GOS2 promoter, more preferably is the promoter GOS2 promoter from rice. Further preferably the constitutive promoter is represented by a nucleic acid sequence substantially similar to SEQ ID NO: 135, most preferably the constitutive promoter is as represented by SEQ ID NO: 135. See the “Definitions” section herein for further examples of constitutive promoters.

[0374] Optionally, one or more terminator sequences may be used in the construct introduced into a plant. Preferably, the construct comprises an expression cassette comprising a GOS2 promoter, substantially similar to SEQ ID NO: 135, and the nucleic acid encoding the SPT-like polypeptide.

[0375] Concerning IDI2 polypeptides, it should be clear that the applicability of the present invention is not restricted to the IDI2 polypeptide-encoding nucleic acid represented by SEQ ID NO: 139, nor is the applicability of the invention restricted to expression of an IDI2 polypeptide-encoding nucleic acid when driven by a constitutive promoter.

[0376] The constitutive promoter is preferably a medium strength promoter, more preferably selected from a plant, such as a GOS2 promoter, more preferably is the promoter GOS2 promoter from rice. Further preferably the constitutive promoter is represented by a nucleic acid sequence substantially similar to SEQ ID NO: 149, most preferably the constitutive promoter is as represented by SEQ ID NO: 149. See the “Definitions” section herein for further examples of constitutive promoters.

[0377] Optionally, one or more terminator sequences may be used in the construct introduced into a plant. Preferably, the construct comprises an expression cassette comprising a rice GOS2 promoter, substantially similar to SEQ ID NO: 149, and the nucleic acid encoding the IDI2 polypeptide.

[0378] Concerning eIF4F-like protein complex subunits, it should be clear that the applicability of the present invention is not restricted to the eIF4F-like protein complex subunit polypeptide-encoding nucleic acids represented by SEQ ID NO: 240, SEQ ID NO: 300 and/or SEQ ID NO: 560, nor is the applicability of the invention restricted to expression of an eIF4F-like protein complex subunit polypeptide-encoding nucleic acids when driven by a constitutive promoter.

[0379] The constitutive promoter is preferably a medium strength promoter, more preferably selected from a plant derived promoter, such as a GOS2 promoter, more preferably is the promoter GOS2 promoter from rice. Further preferably the constitutive promoter is represented by a nucleic acid sequence substantially similar to SEQ ID NO: 818 and/or SEQ ID NO: 819, most preferably the constitutive promoter is as represented by SEQ ID NO: 818. See the “Definitions” section herein for further examples of constitutive promoters.

[0380] Optionally, one or more terminator sequences may be used in the construct introduced into a plant. Preferably, the construct comprises an expression cassette comprising a GOS2 promoter, substantially similar to SEQ ID NO: 818, and at least a nucleic acid encoding an eIF4F-like protein complex subunit polypeptide.

[0381] Concerning GR-RBP polypeptides, it should be clear that the applicability of the present invention is not restricted to the GR-RBP polypeptide-encoding nucleic acid represented by SEQ ID NO: 826, nor is the applicability of the invention restricted to expression of a GR-RBP polypeptide-encoding nucleic acid when driven by a constitutive promoter.

[0382] The constitutive promoter is preferably a medium strength promoter, more preferably selected from a plant derived promoter, such as a GOS2 promoter; more preferably the promoter is the GOS2 promoter from rice. Further preferably the constitutive promoter is represented by a nucleic acid sequence substantially similar to SEQ ID NO: 840, most preferably the constitutive promoter is as represented by SEQ ID NO: 840. See the “Definitions” section herein for further examples of constitutive promoters.

[0383] Optionally, one or more terminator sequences may be used in the construct introduced into a plant. Preferably, the construct comprises an expression cassette comprising a rice GOS2 promoter, substantially similar to SEQ ID NO: 840, and the nucleic acid encoding the GR-RBP polypeptide.

[0384] Additional regulatory elements may include transcriptional as well as translational enhancers. Those skilled in the art will be aware of terminator and enhancer sequences that may be suitable for use in performing the invention. An intron sequence may also be added to the 5′ untranslated region (UTR) or in the coding sequence to increase the amount of the mature message that accumulates in the cytosol, as described in the definitions section. Other control sequences (besides promoter, enhancer, silencer, intron sequences, 3′UTR and/or 5′UTR regions) may be protein and/or RNA stabilizing elements. Such sequences would be known or may readily be obtained by a person skilled in the art.

[0385] The genetic constructs of the invention may further include an origin of replication sequence that is required for maintenance and/or replication in a specific cell type. One example is when a genetic construct is required to be maintained in a bacterial cell as an episomal genetic element (e.g. plasmid or cosmid molecule). Preferred origins of replication include, but are not limited to, the f1-ori and colE1.

[0386] For the detection of the successful transfer of the nucleic acid sequences as used in the methods of the invention and/or selection of transgenic plants comprising these nucleic acids, it is advantageous to use marker genes (or reporter genes). Therefore, the genetic construct may optionally comprise a selectable marker gene. Selectable markers are described in more detail in the “definitions” section herein. The marker genes may be removed or excised from the transgenic cell once they are no longer needed. Techniques for marker removal are known in the art, useful techniques are described above in the definitions section.

[0387] The invention also provides a method for the production of transgenic plants having enhanced yield-related traits relative to control plants, comprising introduction and expression in a plant of any nucleic acid encoding a C3H-like polypeptide, or a SPT polypeptide, or an IDI2 polypeptide, or an eIF4F-like protein complex subunit, or a GR-RBP polypeptide, as defined hereinabove.

[0388] More specifically, the present invention provides a method for the production of transgenic plants having enhanced yield-related traits, particularly increased (seed) yield, which method comprises:
[0389] (i) introducing and expressing in a plant or plant cell nucleic acid encoding a C3H-like polypeptide, or a SPT polypeptide, or an IDI2 polypeptide, or an eIF4F-like protein complex subunit, or a GR-RBP polypeptide; and
[0390] (ii) cultivating the plant cell under conditions promoting plant growth and development.

[0391] The nucleic acid of (i) may be any of the nucleic acids capable of encoding a C3H-like polypeptide, or a SPT polypeptide, or an IDI2 polypeptide, or an eIF4F-like protein complex subunit, or a GR-RBP polypeptide, as defined herein.

[0392] The invention also provides a method for the production of transgenic plants having enhanced yield-related traits relative to control plants, comprising introduction and expression in a plant of any nucleic acid encoding a C3H-like polypeptide, or a SPT polypeptide, or an IDI2 polypeptide, or an eIF4F-like protein complex subunit, or a GR-RBP polypeptide, as defined hereinabove.

[0393] More specifically, the present invention provides a method for the production of transgenic plants having enhanced yield-related traits, particularly increased yield and/or increased early vigour, which method comprises:
[0394] (i) introducing and expressing in a plant or plant cell nucleic acid encoding a C3H-like polypeptide, or a SPT polypeptide, or an IDI2 polypeptide, or an eIF4F-like protein complex subunit, or a GR-RBP polypeptide; and
[0395] (ii) cultivating the plant cell under conditions promoting plant growth and development.

[0396] The nucleic acid of (i) may be any of the nucleic acids capable of encoding a C3H-like polypeptide, or a SPT polypeptide, or an IDI2 polypeptide, or an eIF4F-like protein complex subunit, or a GR-RBP polypeptide, as defined herein.

[0397] The invention also provides a method for the production of transgenic plants having enhanced yield-related traits relative to control plants, comprising introduction and expression in a plant of at least a nucleic acid encoding an eIF4F-like protein complex subunit polypeptide, as defined hereinabove.

[0398] More specifically, the present invention provides a method for the production of transgenic plants having enhanced yield-related traits, particularly increased (seed) yield, which method comprises:
[0399] (i) introducing and expressing in a plant or plant cell at least an eIF4F-like protein complex subunit polypeptide-encoding nucleic acid; and
[0400] (ii) cultivating the plant cell under conditions promoting plant growth and development.

[0401] The nucleic acid of (i) may be any of the nucleic acids capable of encoding an eIF4F-like protein complex subunit polypeptides as defined herein.

[0402] The nucleic acid may be introduced directly into a plant cell or into the plant itself (including introduction into a tissue, organ or any other part of a plant). According to a preferred feature of the present invention, the nucleic acid is preferably introduced into a plant, by transformation. The term “transformation” is described in more detail in the “definitions” section herein.

[0403] The genetically modified plant cells can be regenerated via all methods with which the skilled worker is familiar. Suitable methods can be found in the abovementioned publications by S. D. Kung and R. Wu, Potrykus or Hofgen and Willmitzer.

[0404] Generally after transformation, plant cells or cell groupings are selected for the presence of one or more markers which are encoded by plant-expressible genes co-transferred with the gene of interest, following which the transformed material is regenerated into a whole plant. To select transformed plants, the plant material obtained in the transformation is, as a rule, subjected to selective conditions so that transformed plants can be distinguished from untransformed plants. For example, the seeds obtained in the above-described manner can be planted and, after an initial growing period, subjected to a suitable selection by spraying. A further possibility consists in growing the seeds, if appropriate after sterilization, on agar plates using a suitable selection agent so that only the transformed seeds can grow into plants. Alternatively, the transformed plants are screened for the presence of a selectable marker such as the ones described above.

[0405] Following DNA transfer and regeneration, putatively transformed plants may also be evaluated, for instance using Southern analysis, for the presence of the gene of interest, copy number and/or genomic organisation. Alternatively or additionally, expression levels of the newly introduced DNA may be monitored using Northern and/or Western analysis, both techniques being well known to persons having ordinary skill in the art.

[0406] The generated transformed plants may be propagated by a variety of means, such as by clonal propagation or classical breeding techniques. For example, a first generation (or T1) transformed plant may be selfed and homozygous second-generation (or T2) transformants selected, and the T2 plants may then further be propagated through classical breeding techniques. The generated transformed organisms may take a variety of forms. For example, they may be chimeras of transformed cells and non-transformed cells; clonal transformants (e.g., all cells transformed to contain the expression cassette); grafts of transformed and untransformed tissues (e.g., in plants, a transformed rootstock grafted to an untransformed scion).

[0407] The present invention clearly extends to any plant cell or plant produced by any of the methods described herein, and to all plant parts and propagules thereof. The present invention extends further to encompass the progeny of a primary transformed or transfected cell, tissue, organ or whole plant that has been produced by any of the aforementioned methods, the only requirement being that progeny exhibit the same genotypic and/or phenotypic characteristic(s) as those produced by the parent in the methods according to the invention.

[0408] The invention also includes host cells containing an isolated nucleic acid encoding a C3H-like polypeptide, or an SPT polypeptide, or an IDI2 polypeptide, or an el F4F-like protein complex subunit polypeptide, or a GR-RBP polypeptide, as defined hereinabove. Preferred host cells according to the invention are plant cells. Host plants for the nucleic acids or the vector used in the method according to the invention, the expression cassette or construct or vector are, in principle, advantageously all plants, which are capable of synthesizing the polypeptides used in the inventive method.

[0409] The methods of the invention are advantageously applicable to any plant. Plants that are particularly useful in the methods of the invention include all plants which belong to the superfamily Viridiplantae, in particular monocotyledonous and dicotyledonous plants including fodder or forage legumes, ornamental plants, food crops, trees or shrubs. According to a preferred embodiment of the present invention, the plant is a crop plant. Examples of crop plants include soybean, sunflower, canola, alfalfa, rapeseed, linseed, cotton, tomato, potato and tobacco. Further preferably, the plant is a monocotyledonous plant. Examples of monocotyledonous plants include sugarcane. More preferably the plant is a cereal. Examples of cereals include rice, maize, wheat, barley, millet, rye, triticale, sorghum, emmer, spelt, secale, einkorn, teff, milo and oats.

[0410] The invention also extends to harvestable parts of a plant such as, but not limited to seeds, leaves, fruits, flowers, stems, roots, rhizomes, tubers and bulbs, which harvestable parts comprise a recombinant nucleic acid encoding a C3H-like polypeptide, or an SPT polypeptide, or an IDI2 polypeptide, or an eIF4F-like protein complex subunit polypeptide, or a GR-RBP polypeptide. The invention furthermore relates to products derived, preferably directly derived, from a harvestable part of such a plant, such as dry pellets or powders, oil, fat and fatty acids, starch or proteins.

[0411] According to a preferred feature of the invention, the modulated expression is increased expression. Methods for increasing expression of nucleic acids or genes, or gene products, are well documented in the art and examples are provided in the definitions section.

[0412] As mentioned above, a preferred method for modulating expression of a nucleic acid encoding a C3H-like polypeptide, or an SPT polypeptide, or an IDI2 polypeptide, or an eIF4F-like protein complex subunit polypeptide, or a GR-RBP polypeptide, is by introducing and expressing in a plant a nucleic acid encoding a C3H-like polypeptide, or an SPT polypeptide, or an IDI2 polypeptide, or an eIF4F-like protein complex subunit polypeptide, or a GR-RBP polypeptide; however the effects of performing the method, i.e. enhancing yield-related traits may also be achieved using other well known techniques, including but not limited to T-DNA activation tagging, TILLING, homologous recombination. A description of these techniques is provided in the definitions section.

[0413] The present invention also encompasses use of nucleic acids encoding C3H-like polypeptides as described herein and use of these C3H-like polypeptides, or SPT polypeptides, or IDI2 polypeptides, or eIF4F-like protein complex subunit polypeptides, or GR-RBP polypeptides, in enhancing any of the aforementioned yield-related traits in plants.

[0414] Nucleic acids encoding a C3H-like polypeptide, or an SPT polypeptide, or an IDI2 polypeptide, or an eIF4F-like protein complex subunit polypeptide, or a GR-RBP polypeptide, described herein, or the C3H-like polypeptides, or SPT polypeptides, or IDI2 polypeptides, or eIF4F-like protein complex subunit polypeptides, or GR-RBP polypeptides, themselves, may find use in breeding programmes in which a DNA marker is identified which may be genetically linked to gene encoding a C3H-like polypeptide, or an SPT polypeptide, or an IDI2 polypeptide, or an eIF4F-like protein complex subunit polypeptide, or a GR-RBP polypeptide. The nucleic acids/genes, or the C3H-like polypeptides, or SPT polypeptides, or IDI2 polypeptides, or eIF4F-like protein complex subunit polypeptides, or GR-RBP polypeptides, themselves may be used to define a molecular marker. This DNA or protein marker may then be used in breeding programmes to select plants having enhanced yield-related traits as defined hereinabove in the methods of the invention.

[0415] Allelic variants of a C3H-like polypeptide-encoding nucleic acid/gene may also find use in marker-assisted breeding programmes. Such breeding programmes sometimes require introduction of allelic variation by mutagenic treatment of the plants, using for example EMS mutagenesis; alternatively, the programme may start with a collection of allelic variants of so called “natural” origin caused unintentionally. Identification of allelic variants then takes place, for example, by PCR. This is followed by a step for selection of superior allelic variants of the sequence in question and which give increased yield. Selection is typically carried out by monitoring growth performance of plants containing different allelic variants of the sequence in question. Growth performance may be monitored in a greenhouse or in the field. Further optional steps include crossing plants in which the superior allelic variant was identified with another plant. This could be used, for example, to make a combination of interesting phenotypic features.

[0416] Nucleic acids encoding C3H-like polypeptides, or SPT polypeptides, or IDI2 polypeptides, or eIF4F-like protein complex subunit polypeptides, or GR-RBP polypeptides, may also be used as probes for genetically and physically mapping the genes that they are a part of, and as markers for traits linked to those genes. Such information may be useful in plant breeding in order to develop lines with desired phenotypes. Such use of nucleic acids encoding C3H-like polypeptide, or SPT polypeptide, or IDI2 polypeptide, or eIF4F-like protein complex subunit polypeptide, or GR-RBP polypeptide, requires only a nucleic acid sequence of at least 15 nucleotides in length. The nucleic acids encoding C3H-like polypeptide, or SPT polypeptide, or IDI2 polypeptide, or eIF4F-like protein complex subunit polypeptide, or GR-RBP polypeptide, may be used as restriction fragment length polymorphism (RFLP) markers. Southern blots (Sambrook J, Fritsch E F and Maniatis T (1989) Molecular Cloning, A Laboratory Manual) of restriction-digested plant genomic DNA may be probed with the nucleic acids encoding C3H-like polypeptide, or SPT polypeptide, or IDI2 polypeptide, or eIF4F-like protein complex subunit polypeptide, or GR-RBP polypeptide. The resulting banding patterns may then be subjected to genetic analyses using computer programs such as MapMaker (Lander et al. (1987) Genomics 1: 174-181) in order to construct a genetic map. In addition, the nucleic acids may be used to probe Southern blots containing restriction endonuclease-treated genomic DNAs of a set of individuals representing parent and progeny of a defined genetic cross. Segregation of the DNA polymorphisms is noted and used to calculate the position of the nucleic acid encoding C3H-like polypeptide, or SPT polypeptide, or IDI2 polypeptide, or eIF4F-like protein complex subunit polypeptide, or GR-RBP polypeptide, in the genetic map previously obtained using this population (Botstein et al. (1980) Am. J. Hum. Genet. 32:314-331).

[0417] The production and use of plant gene-derived probes for use in genetic mapping is described in Bernatzky and Tanksley (1986) Plant Mol. Biol. Reporter 4: 37-41. Numerous publications describe genetic mapping of specific cDNA clones using the methodology outlined above or variations thereof. For example, F2 intercross populations, backcross populations, randomly mated populations, near isogenic lines, and other sets of individuals may be used for mapping. Such methodologies are well known to those skilled in the art.

[0418] The nucleic acid probes may also be used for physical mapping (i.e., placement of sequences on physical maps; see Hoheisel et al. In: Non-mammalian Genomic Analysis: A Practical Guide, Academic press 1996, pp. 319-346, and references cited therein).

[0419] In another embodiment, the nucleic acid probes may be used in direct fluorescence in situ hybridisation (FISH) mapping (Trask (1991) Trends Genet. 7:149-154). Although current methods of FISH mapping favour use of large clones (several kb to several hundred kb; see Laan et al. (1995) Genome Res. 5:13-20), improvements in sensitivity may allow performance of FISH mapping using shorter probes.

[0420] A variety of nucleic acid amplification-based methods for genetic and physical mapping may be carried out using the nucleic acids. Examples include allele-specific amplification (Kazazian (1989) J. Lab. Clin. Med. 11:95-96), polymorphism of PCR-amplified fragments (CAPS; Sheffield et al. (1993) Genomics 16:325-332), allele-specific ligation (Landegren et al. (1988) Science 241:1077-1080), nucleotide extension reactions (Sokolov (1990) Nucleic Acid Res. 18:3671), Radiation Hybrid Mapping (Walter et al. (1997) Nat. Genet. 7:22-28) and Happy Mapping (Dear and Cook (1989) Nucleic Acid Res. 17:6795-6807). For these methods, the sequence of a nucleic acid is used to design and produce primer pairs for use in the amplification reaction or in primer extension reactions. The design of such primers is well known to those skilled in the art. In methods employing PCR-based genetic mapping, it may be necessary to identify DNA sequence differences between the parents of the mapping cross in the region corresponding to the instant nucleic acid sequence. This, however, is generally not necessary for mapping methods.

[0421] The methods according to the present invention result in plants having enhanced yield-related traits, as described hereinbefore. These traits may also be combined with other economically advantageous traits, such as further yield-enhancing traits, tolerance to other abiotic and biotic stresses, traits modifying various architectural features and/or biochemical and/or physiological features.

### Items

### 1. C3H-like Polypeptides

[0422] 1. A method for enhancing yield-related traits in plants relative to control plants, comprising modulating expression in a plant of a nucleic acid encoding a C3H-like polypeptide,
   [0423] wherein said C3H-like polypeptide comprises Domain 4 and any one or more of Domains 1, 2, 3 and 5:

| | |
|---|---|
| Domain 1: | C-X₂-C-X₁₂₋₂₃-C-X₂-C-X₂-G-F |

[0424] wherein X is any amino acid and the underlined residues are conserved

| | |
|---|---|
| Domain 2: | Y-X₇₋₁₂-L-X₃-P-X₁₀-G |

[0425] wherein X is any amino acid and the underlined residues are conserved

| | |
|---|---|
| Domain 3: | S-K-X₆-P |

[0426] wherein X is any amino acid and the underlined residues are conserved

| | |
|---|---|
| Domain 4: | RING-C3H2C3 type |

[0427] Domain 5: DUF1117
[0428] 2. Method according to item 1, wherein Domain1 is: CYSCTRFINLSDHTL----------IVCPHCDNGF, or a domain comprising the underlined conserved residues and having, in increasing order of preference, at least 60%, 65%, 70%, 75%, 80%, 85%, 90%, 95% or more sequence identity to the non-underlined residues in Domain 1, where “-” is a gap or any residue.
[0429] 3. Method according to item 1 or 2, wherein, Domain 2 is: YDDGDG-----SGLRPLPPTVSEFLLGSG, or a domain comprising the underlined conserved residues and having, in increasing order of preference, at least 60%, 65%, 70%, 75%, 80%, 85%, 90%, 95% or more sequence identity to the non-underlined residues in Domain2, where “-” is a gap or any residue.
[0430] 4. Method according to any one of items 1 to 3, wherein Domain 3 is: SKAAIESMP, or a domain comprising the underlined conserved residues and having, in increasing order of preference, at least 60%, 65%, 70%, 75%, 80%, 85%, 90%, 95% or more sequence identity to the non-underlined residues in Domain3.
[0431] 5. Method according to any one of items 1 to 4, wherein Domain 4 is: CAVCKEEFELHAEARELPCKHLYHSDCILPWLTVRNSCPVCR, or a domain comprising the underlined conserved residues and having, in increasing order of preference, at least 60%, 65%, 70%, 75%, 80%, 85%, 90%, 95% or more sequence identity to the non-underlined residues in Domain4.
[0432] 6. Method according to any one of items 1 to 5, wherein Domain 5 is: GLTIWRLPGGGFAVGRFSGGRSA-GESHFPVVYTEMDGGLN, or a domain having, in increasing order of preference, at least 60%, 65%, 70%, 75%, 80%, 85%, 90%, 95% or more sequence identity to Domain 5, where “-” is a gap or any residue.
[0433] 7. Method according to any one of items 1 to 6, wherein said modulated expression is effected by introducing and expressing in a plant a nucleic acid encoding a C3H-like polypeptide.
[0434] 8. Method according to any one of items 1 to 7, wherein said nucleic acid encoding a C3H-like polypeptide encodes any one of the proteins listed in Table A1 or is a portion of such a nucleic acid, or a nucleic acid capable of hybridising with such a nucleic acid.
[0435] 9. Method according to any one of items 1 to 8, wherein said nucleic acid sequence encodes an orthologue or paralogue of any of the proteins given in Table A1.
[0436] 10. Method according to any preceding item, wherein said enhanced yield-related traits comprise increased yield, preferably increased biomass and/or increased seed yield relative to control plants.
[0437] 11. Method according to any one of items 1 to 10, wherein said enhanced yield-related traits are obtained under conditions of drought stress.
[0438] 12. Method according to any one of items 7 to 11, wherein said nucleic acid is operably linked to a constitutive promoter, preferably to a GOS2 promoter, most preferably to a GOS2 promoter from rice.
[0439] 13. Method according to any one of items 1 to 12, wherein said nucleic acid encoding a C3H-like polypeptide is of plant origin, preferably the family Medicago, more preferably from Medicago truncatula.
[0440] 14. Plant or part thereof, including seeds, obtainable by a method according to any one of items 1 to 13, wherein said plant or part thereof comprises a recombinant nucleic acid encoding a C3H-like polypeptide.
[0441] 15. Construct comprising:
   [0442] (i) nucleic acid encoding a C3H-like polypeptide as defined in any one of items 1 to 6;
   [0443] (ii) one or more control sequences capable of driving expression of the nucleic acid sequence of (a); and optionally
   [0444] (iii) a transcription termination sequence.
[0445] 16. Construct according to item 15, wherein one of said control sequences is a constitutive promoter, preferably a GOS2 promoter, most preferably a GOS2 promoter from rice.
[0446] 17. Use of a construct according to item 15 or 16 in a method for making plants having increased yield, particularly increased biomass and/or increased seed yield relative to control plants.
[0447] 18. Plant, plant part or plant cell transformed with a construct according to item 15 or 16.
[0448] 19. Method for the production of a transgenic plant having increased yield, particularly increased biomass and/or increased seed yield relative to control plants, comprising:
   [0449] (i) introducing and expressing in a plant a nucleic acid encoding a C3H-like polypeptide as defined in any one or more of items 1 to 6; and
   [0450] (ii) cultivating the plant cell under conditions promoting plant growth and development.
[0451] 20. Transgenic plant having increased yield, particularly increased biomass and/or increased seed yield, relative to control plants, resulting from modulated expression of a nucleic acid encoding a C3H-like polypeptide as defined in any one or more of items 1 to 6, or a transgenic plant cell derived from said transgenic plant.
[0452] 21. Transgenic plant according to item 14, 18 or 20, or a transgenic plant cell derived thereof, wherein said plant is a crop plant or a monocot or a cereal, such as rice, maize, wheat, barley, millet, rye, triticale, sorghum emmer, spelt, secale, einkorn, teff, milo and oats.
[0453] 22. Harvestable parts of a plant according to item 21, wherein said harvestable parts are preferably shoot biomass and/or seeds.
[0454] 23. Products derived from a plant according to item 21 and/or from harvestable parts of a plant according to item 22.
[0455] 24. Use of a nucleic acid encoding a C3H-like polypeptide in increasing yield, particularly in increasing seed yield and/or shoot biomass in plants, relative to control plants.

### 2. SPATULA-Like (SPT) Polypeptides

[0456] 1. A method for enhancing yield-related traits in plants relative to control plants, comprising modulating expression in a plant of a nucleic acid encoding an SPT-like polypeptide comprising: each of the following, preferably from N-terminus to C-terminus:
   [0457] Motif I: an amphipathic helix comprising EEISTFLHQLLH, or a motif having in increasing order of preference at least 60%, 65%, 70%, 75%, 80%, 85%, 90%, 95% or more sequence identity to Motif I; and
   [0458] Motif II: an acidic domain comprising DLGDFSCDSEK or a motif having in increasing order of preference at least 60%, 65%, 70%, 75%, 80%, 85%, 90%, 95% or more sequence identity to Motif II; and
   [0459] Motif III: a bHLH domain comprising: AAEVHNLSEKRRRSRINEKMKALQNLIPNSNKT DKASMLDEAIEYLKQL or a motif having in increasing order of preference at least 60%, 65%, 70%, 75%, 80%, 85%, 90%, 95% or more sequence identity to Motif III.
[0460] 2. Method according to item 1, wherein the SPT-like polypeptide further comprises one or more serine-rich regions.
[0461] 3. Method according to item 1 or 2, wherein the bHLH domain further comprises one or more nuclear localisation signals (NLS).
[0462] 4. Method according to any one of items 1 to 3, wherein the SPT-like polypeptide comprises a beta strand adjacent the bHLH domain nearest the C-terminal region, which beta strand preferably comprises QLQVQMLTM.
[0463] 5. Method according to any one of items 1 to 4, wherein said modulated expression is effected by introducing and expressing in a plant a nucleic acid encoding an SPT-like polypeptide.
[0464] 6. Method according to any one of items 1 to 5, wherein said nucleic acid encoding an SPT-like polypeptide encodes any one of the proteins listed in Table A2 or is a portion of such a nucleic acid, or a nucleic acid capable of hybridising with such a nucleic acid.
[0465] 7. Method according to any one of items 1 to 6, wherein said nucleic acid sequence encodes an orthologue or paralogue of any of the proteins given in Table A2.
[0466] 8. Method according to any preceding item, wherein said enhanced yield-related traits comprise increased yield, preferably increased biomass and/or increased seed yield relative to control plants.
[0467] 9. Method according to any one of items 1 to 8, wherein said enhanced yield-related traits are obtained under non-stress conditions.
[0468] 10. Method according to any one of items 1 to 9, wherein said enhanced yield-related traits are obtained under conditions of drought stress, salt stress or nitrogen deficiency.
[0469] 11. Method according to any one of items 3 to 8, wherein said nucleic acid is operably linked to a constitutive promoter, preferably to a GOS2 promoter, most preferably to a GOS2 promoter from rice.
[0470] 12. Method according to any one of items 1 to 11, wherein said nucleic acid encoding an SPT-like polypeptide is of plant origin, preferably from the family Salicaceae, more preferably from the genus Populus, most preferably from Populus trichocarpa.
[0471] 13. Plant or part thereof, including seeds, obtainable by a method according to any one of items 1 to 12, wherein said plant or part thereof comprises a recombinant nucleic acid encoding an SPT-like polypeptide as defined in any one of items 1 to 4.
[0472] 14. Construct comprising:
   [0473] (i) nucleic acid encoding an SPT-like polypeptide as defined in any one of items 1 to 4;
   [0474] (ii) one or more control sequences capable of driving expression of the nucleic acid sequence of (a); and optionally
   [0475] (iii) a transcription termination sequence.
[0476] 15. Construct according to item 14, wherein one of said control sequences is a constitutive promoter, preferably a GOS2 promoter, most preferably a GOS2 promoter from rice.
[0477] 16. Use of a construct according to item 14 or 15 in a method for making plants having increased yield, particularly increased biomass and/or increased seed yield relative to control plants.
[0478] 17. Plant, plant part or plant cell transformed with a construct according to item 14 or 15.
[0479] 18. Method for the production of a transgenic plant having increased yield, particularly increased biomass and/or increased seed yield relative to control plants, comprising:
   [0480] (i) introducing and expressing in a plant a nucleic acid encoding an SPT-like polypeptide as defined in any one of items 1 to 4; and
   [0481] (ii) cultivating the plant cell under conditions promoting plant growth and development.
[0482] 19. Transgenic plant having increased yield, particularly increased biomass and/or increased seed yield, relative to control plants, resulting from modulated expression of a nucleic acid encoding an SPT-like polypeptide as defined in any one of items 1 to 4, or a transgenic plant cell derived from said transgenic plant.
[0483] 20. Transgenic plant according to item 13, 17 or 19, or a transgenic plant cell derived thereof, wherein said plant is a crop plant or a monocot or a cereal, such as rice, maize, wheat, barley, millet, rye, triticale, sorghum emmer, spelt, secale, einkorn, teff, milo and oats.
[0484] 21. Harvestable parts of a plant according to item 20, wherein said harvestable parts are preferably shoot biomass and/or seeds.
[0485] 22. Products derived from a plant according to item 20 and/or from harvestable parts of a plant according to item 21.
[0486] 23. Use of a nucleic acid encoding an SPT-like polypeptide as defined in any one of items 1 to 4 in increasing yield, particularly in increasing seed yield and/or shoot biomass in plants, relative to control plants.

### 3. IDI2 (Iron Deficiency Induced 2) Polypeptides

[0487] 1. A method for enhancing yield-related traits in plants relative to control plants, comprising modulating expression in a plant of a nucleic acid encoding an IDI2 polypeptide, wherein said IDI2 polypeptide comprises an IF-2B domain.
[0488] 2. Method according to item 1, wherein said IDI2 polypeptide comprises one or more of the motifs represented by any of SEQ ID NO: 141 to SEQ ID NO: 146.
[0489] 3. Method according to item 1 or 2, wherein said modulated expression is effected by introducing and expressing in a plant a nucleic acid encoding an IDI2 polypeptide.
[0490] 4. Method according to any one of items 1 to 3, wherein said nucleic acid encoding an IDI2 polypeptide encodes any one of the proteins listed in Table A3 or is a portion of such a nucleic acid, or a nucleic acid capable of hybridising with such a nucleic acid.
[0491] 5. Method according to any one of items 1 to 4, wherein said nucleic acid sequence encodes an orthologue or paralogue of any of the proteins given in Table A3.
[0492] 6. Method according to any preceding item, wherein said enhanced yield-related traits comprise increased yield, preferably increased seed yield relative to control plants.
[0493] 7. Method according to any one of items 1 to 6, wherein said enhanced yield-related traits are obtained under conditions of nitrogen deficiency.
[0494] 8. Method according to any one of items 3 to 7, wherein said nucleic acid is operably linked to a constitutive promoter, preferably to a GOS2 promoter, most preferably to a GOS2 promoter from rice.
[0495] 9. Method according to any one of items 1 to 8, wherein said nucleic acid encoding an IDI2 polypeptide is of plant origin, preferably from a monocotyledonous plant, further preferably from the family Poaceae, more preferably from the genus Saccharum, most preferably from Saccharum officinarum.
[0496] 10. Plant or part thereof, including seeds, obtainable by a method according to any one of items 1 to 9, wherein said plant or part thereof comprises a recombinant nucleic acid encoding an IDI2 polypeptide.
[0497] 11. Construct comprising:
   [0498] (i) nucleic acid encoding an IDI2 polypeptide as defined in items 1 or 2;
   [0499] (ii) one or more control sequences capable of driving expression of the nucleic acid sequence of (a); and optionally
   [0500] (iii) a transcription termination sequence,
[0501] 12. Construct according to item 11, wherein one of said control sequences is a constitutive promoter, preferably a GOS2 promoter, most preferably a GOS2 promoter from rice.
[0502] 13. Use of a construct according to item 11 or 12 in a method for making plants having increased yield, particularly increased seed yield relative to control plants.
[0503] 14. Plant, plant part or plant cell transformed with a construct according to item 11 or 12.
[0504] 15. Method for the production of a transgenic plant having increased yield, particularly increased seed yield relative to control plants, comprising:
   [0505] (i) introducing and expressing in a plant a nucleic acid encoding an IDI2 polypeptide as defined in item 1 or 2; and
   [0506] (ii) cultivating the plant cell under conditions promoting plant growth and development.
[0507] 16. Transgenic plant having increased yield, particularly increased seed yield, relative to control plants, resulting from modulated expression of a nucleic acid encoding an IDI2 polypeptide as defined in item 1 or 2, or a transgenic plant cell derived from said transgenic plant.
[0508] 17. Transgenic plant according to item 10, 14 or 16, or a transgenic plant cell derived thereof, wherein said plant is a crop plant or a monocot or a cereal, such as rice, maize, wheat, barley, millet, rye, triticale, sorghum emmer, spelt, secale, einkorn, teff, milo and oats.
[0509] 18. Harvestable parts of a plant according to item 17, wherein said harvestable parts preferably are seeds.
[0510] 19. Products derived from a plant according to item 17 and/or from harvestable parts of a plant according to item 18.
[0511] 20. Use of a nucleic acid encoding an IDI2 polypeptide in increasing yield, particularly in increasing seed yield in plants, relative to control plants.
[0512] 21. An isolated nucleic acid molecule selected from:
   [0513] (i) a nucleic acid represented by any of SEQ ID NO: 139, 157, 164, 169, 171, 186;
   [0514] (ii) the complement of a nucleic acid represented by any of SEQ ID NO: 139, 157, 164, 169, 171, 186;
   [0515] (iii) a nucleic acid encoding an IDI2 polypeptide having, in increasing order of preference, at least 50%, 55%, 60%, 65%, 70%, 75%, 80%, 85%, 90%, 95%, 96%, 97%, 98%, 99% or more sequence identity to the amino acid sequences represented by any of SEQ ID NO: 140, 202, 209, 214, 216, 231, and comprising one or more of the motifs 1 to 6.
[0516] 22. An isolated polypeptide selected from:
   [0517] (i) an amino acid sequence represented by any of SEQ ID NO: 140, 202, 209, 214, 216, 231;
   [0518] (ii) an amino acid sequence having, in increasing order of preference, at least 50%, 55%, 60%, 65%, 70%, 75%, 80%, 85%, 90%, 95%, 96%, 97%, 98%, 99% or more sequence identity to the amino acid sequences represented by any one of SEQ ID NO: 140, 202, 209, 214, 216, 231, and comprising one or more of the motifs 1 to 6;
   [0519] derivatives of any of the amino acid sequences given in (i) or (ii) above.
      4. eIF4F-Like Protein Complex
[0520] 1. A method for enhancing yield-related traits in plants relative to control plants, comprising modulating the activity of eIF4F-like protein complex by modulation and expression of its subunit polypeptides and/or isoforms thereof and/or by modulating the level of the eIF4F-like protein complex, wherein said eIF4F-like protein complex comprises the subunits eIF4G, eIF4A and eIF4E or isoforms thereof, comprising respectively the following CC domains with the PFam accession numbers:
   [0521] (i) for eIF4G polypeptides: MA3 (PFam accession number: PF02847) and MIF4G (PFam accession number: PF02854);
   [0522] (ii) for eIF4A polypeptides: DEAD (PFam accession number: PF00270) and Helicase_C(PFam accession number: PF00271);
   [0523] (iii) for eIF4E polypeptydes: IF4E (PFam accession number: PF01652).
[0524] 2. A method, according to item 1, wherein said eIF4G subunit polypeptide comprises a CC domain
   [0525] (i) as represented by SEQ ID NO: 240, and/or
   [0526] (ii) preferably having at least 50%, 51%, 52%, 53%, 54%, 55%, 56%, 57%, 58%, 59%, 60%, 61%, 62%, 63%, 64%, 65%, 66%, 67%, 68%, 69%, 70%, 71%, 72%, 73%, 74%, 75%, 76%, 77%, 78%, 79%, 80%, 81%, 82%, 83%, 84%, 85%, 86%, 87%, 88%, 89%, 90%, 91%, 92%, 93%, 94%, 95%, 96%, 97%, 98%, or 99% sequence identity to eIF4G polypeptides represented by SEQ ID NO: 241.
[0527] 3. A method, according to item 1, wherein said eIF4A subunit polypeptide comprises a CC domain
   [0528] (i) as represented by SEQ ID NO: 300, and/or
   [0529] (ii) preferably having at least 50%, 51%, 52%, 53%, 54%, 55%, 56%, 57%, 58%, 59%, 60%, 61%, 62%, 63%, 64%, 65%, 66%, 67%, 68%, 69%, 70%, 71%, 72%, 73%, 74%, 75%, 76%, 77%, 78%, 79%, 80%, 81%, 82%, 83%, 84%, 85%, 86%, 87%, 88%, 89%, 90%, 91%, 92%, 93%, 94%, 95%, 96%, 97%, 98%, or 99% sequence identity to eIF4G polypeptides represented by SEQ ID NO: 301.
[0530] 4. A method, according to item 1, wherein said eIF4E subunit polypeptide comprises a CC domain
   [0531] (i) as represented by SEQ ID NO: 560, and/or
   [0532] (ii) preferably having at least 50%, 51%, 52%, 53%, 54%, 55%, 56%, 57%, 58%, 59%, 60%, 61%, 62%, 63%, 64%, 65%, 66%, 67%, 68%, 69%, 70%, 71%, 72%, 73%, 74%, 75%, 76%, 77%, 78%, 79%, 80%, 81%, 82%, 83%, 84%, 85%, 86%, 87%, 88%, 89%, 90%, 91%, 92%, 93%, 94%, 95%, 96%, 97%, 98%, or 99% sequence identity to eIF4G polypeptides represented by SEQ ID NO: 561.
[0533] 5. Method according to items 1 or 2, wherein said eIF4G subunit polypeptides comprise the following motifs:
   [0534] Motif 7: KAV[LF]EPTFCPMYA[QL]LCSDLNEKLP[PS]FPS[ED]EPGGKEITFKRVLLN[NI]C QEAF or a motif having in an increasing order of preference at least 50%, 51%, 52%, 53%, 54%, 55%, 56%, 57%, 58%, 59%, 60%, 61%, 62%, 63%, 64%, 65%, 66%, 67%, 68%, 69%, 70%, 71%, 72%, 73%, 74%, 75%, 76%, 77%, 78%, 79%, 80%, 81%, 82%, 83%, 84%, 85%, 86%, 87%, 88%, 89%, 90%, 91%, 92%, 93%, 94%, 95%, 96%, 97%, 98%, or 99% or more sequence identity to Motif 7;
   [0535] Motif 8: CP[AE]EENVEAIC[QH]FFNTIGKQLDE[SN]PKSRRIND[MVT]YF[SIN][RQ]LKEL [TS][TS]NPQLAPR or a motif having in an increasing order of preference at least 50%, 51%, 52%, 53%, 54%, 55%, 56%, 57%, 58%, 59%, 60%, 61%, 62%, 63%, 64%, 65%, 66%, 67%, 68%, 69%, 70%, 71%, 72%, 73%, 74%, 75%, 76%, 77%, 78%, 79%, 80%, 81%, 82%, 83%, 84%, 85%, 86%, 87%, 88%, 89%, 90%, 91%, 92%, 93%, 94%, 95%, 96%, 97%, 98%, or 99% or more sequence identity to Motif 8.
   [0536] Motif 9: T[AG]P[DE]QE[ML]ERRDKERLVKLRTLGNIRLIGELLKQKMVPEKIVHHIVQEL LG or a motif having in an increasing order of preference at least 50%, 51%, 52%, 53%, 54%, 55%, 56%, 57%, 58%, 59%, 60%, 61%, 62%, 63%, 64%, 65%, 66%, 67%, 68%, 69%, 70%, 71%, 72%, 73%, 74%, 75%, 76%, 77%, 78%, 79%, 80%, 81%, 82%, 83%, 84%, 85%, 86%, 87%, 88%, 89%, 90%, 91%, 92%, 93%, 94%, 95%, 96%, 97%, 98%, or 99% or more sequence identity to Motif 9;
   [0537] or
   [0538] Motif 10: TPQNF[ED][KR]LFEQVKAVNIDN[AV]VTL[TN]GVISQIF[DE]KALMEPTFCEMY ANFCFH or a motif having in an increasing order of preference at least 50%, 51%, 52%, 53%, 54%, 55%, 56%, 57%, 58%, 59%, 60%, 61%, 62%, 63%, 64%, 65%, 66%, 67%, 68%, 69%, 70%, 71%, 72%, 73%, 74%, 75%, 76%, 77%, 78%, 79%, 80%, 81%, 82%, 83%, 84%, 85%, 86%, 87%, 88%, 89%, 90%, 91%, 92%, 93%, 94%, 95%, 96%, 97%, 98%, or 99% or more sequence identity to Motif 10;
   [0539] Motif 11: IGELYKK[RK]MLTERIMHECIKKLLGQYQ[DN]PDEE[DN][IV]E[AS]LCKLMSTIG EMIDH or a motif having in an increasing order of preference at least 50%, 51%, 52%, 53%, 54%, 55%, 56%, 57%, 58%, 59%, 60%, 61%, 62%, 63%, 64%, 65%, 66%, 67%, 68%, 69%, 70%, 71%, 72%, 73%, 74%, 75%, 76%, 77%, 78%, 79%, 80%, 81%, 82%, 83%, 84%, 85%, 86%, 87%, 88%, 89%, 90%, 91%, 92%, 93%, 94%, 95%, 96%, 97%, 98%, or 99% or more sequence identity to Motif 11;
   [0540] Motif 12: LSNN[MQ][KN]LSSRVRFMLKD[ASV]IDLRKNKWQQRRKVEGPKKIEEVHRDA AQERQ or a motif having in an increasing order of preference at least 50%, 51%, 52%, 53%, 54%, 55%, 56%, 57%, 58%, 59%, 60%, 61%, 62%, 63%, 64%, 65%, 66%, 67%, 68%, 69%, 70%, 71%, 72%, 73%, 74%, 75%, 76%, 77%, 78%, 79%, 80%, 81%, 82%, 83%, 84%, 85%, 86%, 87%, 88%, 89%, 90%, 91%, 92%, 93%, 94%, 95%, 96%, 97%, 98%, or 99% or more sequence identity to Motif 12.
[0541] 6. Method according to item 5, wherein said eIF4G subunit polypeptides is preferably a eIF4 isoG polypeptide and comprise the following motifs:
   [0542] Motif 7: KAV[LF]EPTFCPMYA[QL]LCSDLNEKLP[PS]FPS[ED]EPGGKEITFKRVLLN[NI]CQEAF or a motif having in an increasing order of preference at least 50%, 51%, 52%, 53%, 54%, 55%, 56%, 57%, 58%, 59%, 60%, 61%, 62%, 63%, 64%, 65%, 66%, 67%, 68%, 69%, 70%, 71%, 72%, 73%, 74%, 75%, 76%, 77%, 78%, 79%, 80%, 81%, 82%, 83%, 84%, 85%, 86%, 87%, 88%, 89%, 90%, 91%, 92%, 93%, 94%, 95%, 96%, 97%, 98%, or 99% or more sequence identity to Motif 7;
   [0543] Motif 8: CP[AE]EENVEAIC[QH]FFNTIGKQLDE[SN]PKSRRIND[MVT]YF[SIN][RQ]LKEL [TS][TS]NPQLAPR or a motif having in an increasing order of preference at least 50%, 51%, 52%, 53%, 54%, 55%, 56%, 57%, 58%, 59%, 60%, 61%, 62%, 63%, 64%, 65%, 66%, 67%, 68%, 69%, 70%, 71%, 72%, 73%, 74%, 75%, 76%, 77%, 78%, 79%, 80%, 81%, 82%, 83%, 84%, 85%, 86%, 87%, 88%, 89%, 90%, 91%, 92%, 93%, 94%, 95%, 96%, 97%, 98%, or 99% or more sequence identity to Motif 8.
   [0544] Motif 9: T[AG]P[DE]QE[ML]ERRDKERLVKLRTLGNIRLIGELLKQKMVPEKIVHHIVQEL LG or a motif having in an increasing order of preference at least 50%, 51%, 52%, 53%, 54%, 55%, 56%, 57%, 58%, 59%, 60%, 61%, 62%, 63%, 64%, 65%, 66%, 67%, 68%, 69%, 70%, 71%, 72%, 73%, 74%, 75%, 76%, 77%, 78%, 79%, 80%, 81%, 82%, 83%, 84%, 85%, 86%, 87%, 88%, 89%, 90%, 91%, 92%, 93%, 94%, 95%, 96%, 97%, 98%, or 99% or more sequence identity to Motif 9.
[0545] 7. Method according to item 1 or 3, wherein said eIF4A subunit polypeptides comprise the following motifs:
   [0546] Motif 13: RDELTLEGIKQF[YF]V[NA]V[ED][KR]EEWK[LF][DE]TLCDLY[ED]TL [AT]ITQ [SA]VIF or a motif having in an increasing order of preference at least 50%, 51%, 52%, 53%, 54%, 55%, 56%, 57%, 58%, 59%, 60%, 61%, 62%, 63%, 64%, 65%, 66%, 67%, 68%, 69%, 70%, 71%, 72%, 73%, 74%, 75%, 76%, 77%, 78%, 79%, 80%, 81%, 82%, 83%, 84%, 85%, 86%, 87%, 88%, 89%, 90%, 91%, 92%, 93%, 94%, 95%, 96%, 97%, 98%, or 99% or more sequence identity to Motif 13.
   [0547] Motif 14: SLVINYDLP[TN][QN][PR]E[NL]Y[LI]HRIGRSGRFGRKGVAINF or a motif having in an increasing order of preference at least 50%, 51%, 52%, 53%, 54%, 55%, 56%, 57%, 58%, 59%, 60%, 61%, 62%, 63%, 64%, 65%, 66%, 67%, 68%, 69%, 70%, 71%, 72%, 73%, 74%, 75%, 76%, 77%, 78%, 79%, 80%, 81%, 82%, 83%, 84%, 85%, 86%, 87%, 88%, 89%, 90%, 91%, 92%, 93%, 94%, 95%, 96%, 97%, 98%, or 99% or more sequence identity to Motif 14.
   [0548] Motif 15: MG[LI][QK]E[ND]LLRGIYAYGFEKPSAIQQR[GA][IV]VP[FI][CI]KG[LR]DVI[QA]QAQSGTGKT[AS][TM][FI] or a motif having in an increasing order of preference at least 50%, 51%, 52%, 53%, 54%, 55%, 56%, 57%, 58%, 59%, 60%, 61%, 62%, 63%, 64%, 65%, 66%, 67%, 68%, 69%, 70%, 71%, 72%, 73%, 74%, 75%, 76%, 77%, 78%, 79%, 80%, 81%, 82%, 83%, 84%, 85%, 86%, 87%, 88%, 89%, 90%, 91%, 92%, 93%, 94%, 95%, 96%, 97%, 98%, or 99% or more sequence identity to Motif 15.
[0549] 8. Method according to item 1 or 4, wherein said eIF4E subunit polypeptides comprise the following motifs:
   [0550] Motif 16: YTFSTVE[ED]FW[SG]LYNNIH[HR]PSKLAVGADF[HY]CFK[NH]KIEPKWEDP [VI]CANGGKW or a motif having in an increasing order of preference at least 50%, 51%, 52%, 53%, 54%, 55%, 56%, 57%, 58%, 59%, 60%, 61%, 62%, 63%, 64%, 65%, 66%, 67%, 68%, 69%, 70%, 71%, 72%, 73%, 74%, 75%, 76%, 77%, 78%, 79%, 80%, 81%, 82%, 83%, 84%, 85%, 86%, 87%, 88%, 89%, 90%, 91%, 92%, 93%, 94%, 95%, 96%, 97%, 98%, or 99% or more sequence identity to Motif 16;
   [0551] Motif 17: T[SC]WLYTLLA[ML]IGEQFD[HY]GD[ED]ICGAVV[NS]VR or a motif having in an increasing order of preference at least 50%, 51%, 52%, 53%, 54%, 55%, 56%, 57%, 58%, 59%, 60%, 61%, 62%, 63%, 64%, 65%, 66%, 67%, 68%, 69%, 70%, 71%, 72%, 73%, 74%, 75%, 76%, 77%, 78%, 79%, 80%, 81%, 82%, 83%, 84%, 85%, 86%, 87%, 88%, 89%, 90%, 91%, 92%, 93%, 94%, 95%, 96%, 97%, 98%, or 99% or more sequence identity to Motif 17;
   [0552] Motif 18: E[KR]I[AS][LI]WTKNA[AS]NE[AST]AQ[VL]SIGKQWKEFLDYN[DE][TS]IGFIFH [ED]DA or a motif having in an increasing order of preference at least 50%, 51%, 52%, 53%, 54%, 55%, 56%, 57%, 58%, 59%, 60%, 61%, 62%, 63%, 64%, 65%, 66%, 67%, 68%, 69%, 70%, 71%, 72%, 73%, 74%, 75%, 76%, 77%, 78%, 79%, 80%, 81%, 82%, 83%, 84%, 85%, 86%, 87%, 88%, 89%, 90%, 91%, 92%, 93%, 94%, 95%, 96%, 97%, 98%, or 99% or more sequence identity to Motif 18;
   [0553] or
   [0554] Motif 19: WCLYDQ[IV]F[KR]PSKLP[GA]NADFHLFKAG[VI]EPKWEDPECANGGKW or a motif having in an increasing order of preference at least 50%, 51%, 52%, 53%, 54%, 55%, 56%, 57%, 58%, 59%, 60%, 61%, 62%, 63%, 64%, 65%, 66%, 67%, 68%, 69%, 70%, 71%, 72%, 73%, 74%, 75%, 76%, 77%, 78%, 79%, 80%, 81%, 82%, 83%, 84%, 85%, 86%, 87%, 88%, 89%, 90%, 91%, 92%, 93%, 94%, 95%, 96%, 97%, 98%, or 99% or more sequence identity to Motif 19;
   [0555] Motif 20: L[ED]TMWLETLMALIGEQFD[ED][AS][DE][ED]ICGWASVR or a motif having in an increasing order of preference at least 50%, 51%, 52%, 53%, 54%, 55%, 56%, 57%, 58%, 59%, 60%, 61%, 62%, 63%, 64%, 65%, 66%, 67%, 68%, 69%, 70%, 71%, 72%, 73%, 74%, 75%, 76%, 77%, 78%, 79%, 80%, 81%, 82%, 83%, 84%, 85%, 86%, 87%, 88%, 89%, 90%, 91%, 92%, 93%, 94%, 95%, 96%, 97%, 98%, or 99% or more sequence identity to Motif 20;
   [0556] Motif 21: QDKL[SA]LWT[KR][TN]A[AS]NEA[AV]QM[SG]IG[RK]KWKE[IV]ID or a motif having in an increasing order of preference at least 50%, 51%, 52%, 53%, 54%, 55%, 56%, 57%, 58%, 59%, 60%, 61%, 62%, 63%, 64%, 65%, 66%, 67%, 68%, 69%, 70%, 71%, 72%, 73%, 74%, 75%, 76%, 77%, 78%, 79%, 80%, 81%, 82%, 83%, 84%, 85%, 86%, 87%, 88%, 89%, 90%, 91%, 92%, 93%, 94%, 95%, 96%, 97%, 98%, or 99% or more sequence identity to Motif 21.
[0557] 9. Method, according to any of items 1 to 8, wherein said modulating expression of at least one of the said subunits eIF4E, eIF4G and eIF4A is effected by introducing and expressing of at least a nucleic acid encoding one of the eIF4F subunits polypeptides or a portion of at least such nucleic acids, or a nucleic acid capable of hybridising with such a nucleic acid.
[0558] 10. Method, according to items 1, 2, 5 or 6, wherein said nucleic acid encodes the eIF4G subunit polypeptide and/or its isoforms or a portion of such a nucleic acid, or a nucleic acid capable of hybridising with such a nucleic acid, being the eIF4F subunit polypeptide preferably the eIF4 isoG subunit.
[0559] 11. Method, according to item 1, 3 or 7, wherein said nucleic acid encodes the eIF4A subunit polypeptide and/or its isoforms or a portion of such a nucleic acid, or a nucleic acid capable of hybridising with such a nucleic acid, being the eIF4F subunit preferably the eIF4A subunit.
[0560] 12. Method, according to item 1, 4 or 8, wherein said nucleic acid encodes the eIF4E subunit polypeptide and/or its isoforms, subunit or a portion of such a nucleic acid, or a nucleic acid capable of hybridising with such a nucleic acid, being the eIF4F subunit preferably the eIF4 isoE subunit.
[0561] 13. Method, according to any of the items 1 to 12, wherein said nucleic acids, or a portion of such a nucleic acid, or a nucleic acid capable of hybridising with such a nucleic acid encoding for eIF4F subunits polypeptides are overexpressed, preferably those encoding for eIF4G and/or eIF4A and/or their isoforms, particularly those encoding for eIF4 isoG and/or eIF4A.
[0562] 14. Method according to any one of items 1 to 13, wherein said nucleic acids sequences encodes an orthologue or paralogue of any of the polypeptides given in Tables A4.
[0563] 15. Method according to any of items 1 to 14, wherein said enhanced yield-related traits comprise increased yield, preferably increased biomass and/or increased seed yield relative to control plants.
[0564] 16. Method according to any one of items 1 to 15, wherein said enhanced yield-related traits are obtained under non-stress conditions.
[0565] 17. Method according to any one of items 1 to 16, wherein said enhanced yield-related traits are obtained under conditions of drought stress, salt stress or nitrogen deficiency.
[0566] 18. Method according to any one of items 3 to 17, wherein said nucleic acid is operably linked to a constitutive promoter, preferably to a GOS2 promoter, most preferably to a GOS2 promoter from rice.
[0567] 19. Method according to any one of items 1 to 18, wherein said nucleic acid encoding at least an eIF4F polypeptide subunit is of plant origin, preferably from a dicotyledonous plant, further preferably from the family Brassicaceae, more preferably from the genus Arabidopsis, most preferably from Arabidopsis thaliana.
[0568] 20. Plant or part thereof, including seeds, obtainable by a method according to any one of items 1 to 19, wherein said plant or part thereof comprises at least a recombinant nucleic acid encoding an eIF4F polypeptide subunit.
[0569] 21. Construct comprising:
   [0570] (i) nucleic acid encoding at least an eIF4F polypeptide subunit as defined in items 1 or 2;
   [0571] (ii) one or more control sequences capable of driving expression of the nucleic acid sequence of (a); and optionally
   [0572] (iii) a transcription termination sequence.
[0573] 22. Construct according to item 21, wherein one of said control sequences is a constitutive promoter, preferably a GOS2 promoter, most preferably a GOS2 promoter from rice.
[0574] 23. Use of a construct according to item 21 or 22 in a method for making plants having increased yield, particularly increased biomass and/or increased seed yield relative to control plants.
[0575] 24. Plant, plant part or plant cell transformed with a construct according to item 21 or 22.
[0576] 25. Method for the production of a transgenic plant having increased yield, particularly increased biomass and/or increased seed yield relative to control plants, comprising:
   [0577] (i) introducing and expressing in a plant a nucleic acid encoding at least an eIF4F polypeptide subunit as defined in item 1 or 2; and
   [0578] (ii) cultivating the plant cell under conditions promoting plant growth and development.
[0579] 26. Transgenic plant having increased yield, particularly increased biomass and/or increased seed yield, relative to control plants, resulting from modulated expression of at least a nucleic acid encoding a at least an eIF4F polypeptide subunit as defined in item 1 or 2, or a transgenic plant cell derived from said transgenic plant.
[0580] 27. Transgenic plant according to item 20, 24 or 26, or a transgenic plant cell derived thereof, wherein said plant is a crop plant or a monocot or a cereal, such as rice, maize, wheat, barley, millet, rye, triticale, sorghum emmer, spelt, secale, einkorn, teff, milo and oats.
[0581] 28. Harvestable parts of a plant according to item 27, wherein said harvestable parts are preferably shoot biomass and/or seeds.
[0582] 29. Products derived from a plant according to item 27 and/or from harvestable parts of a plant according to item 28.
[0583] 30. Use of a nucleic acid encoding at least an eIF4F polypeptide subunit in increasing yield, particularly in increasing seed yield and/or shoot biomass in plants, relative to control plants.
[0584] 31. An isolated nucleic acid molecule selected from:
   [0585] (i) a nucleic acid represented by SEQ ID NO: 306;
   [0586] (ii) the complement of a nucleic acid represented by SEQ ID NO: 306;
   [0587] (iii) a nucleic acid encoding the polypeptide as represented by any one of SEQ ID NO: 307, preferably as a result of the degeneracy of the genetic code, said isolated nucleic acid can be derived from a polypeptide sequence as represented by SEQ ID NO: 307 and further preferably confers enhanced yield-related traits relative to control plants;
   [0588] (iv) a nucleic acid having, in increasing order of preference at least 30%, 31%, 32%, 33%, 34%, 35%, 36%, 37%, 38%, 39%, 40%, 41%, 42%, 43%, 44%, 45%, 46%, 47%, 48%, 49%, 50%, 51%, 52%, 53%, 54%, 55%, 56%, 57%, 58%, 59%, 60%, 61%, 62%, 63%, 64%, 65%, 66%, 67%, 68%, 69%, 70%, 71%, 72%, 73%, 74%, 75%, 76%, 77%, 78%, 79%, 80%, 81%, 82%, 83%, 84%, 85%, 86%, 87%, 88%, 89%, 90%, 91%, 92%, 93%, 94%, 95%, 96%, 97%, 98%, or 99% sequence identity with any of the nucleic acid sequences of Tables A4 and further preferably conferring enhanced yield-related traits relative to control plants;
   [0589] (v) a nucleic acid molecule which hybridizes with a nucleic acid molecule of (i) to (iv) under stringent hybridization conditions and preferably confers enhanced yield-related traits relative to control plants;
   [0590] (vi) a nucleic acid encoding at least an eIF4F subunit polypeptide having, in increasing order of preference, at least 50%, 51%, 52%, 53%, 54%, 55%, 56%, 57%, 58%, 59%, 60%, 61%, 62%, 63%, 64%, 65%, 66%, 67%, 68%, 69%, 70%, 71%, 72%, 73%, 74%, 75%, 76%, 77%, 78%, 79%, 80%, 81%, 82%, 83%, 84%, 85%, 86%, 87%, 88%, 89%, 90%, 91%, 92%, 93%, 94%, 95%, 96%, 97%, 98%, or 99% sequence identity to the amino acid sequence represented by SEQ ID NO: 307 and any of the other amino acid sequences in Tables A4 and preferably conferring enhanced yield-related traits relative to control plants.
[0591] 32. An isolated polypeptide selected from:
   [0592] (i) an amino acid sequence represented by SEQ ID NO: 307;
   [0593] (ii) an amino acid sequence having, in increasing order of preference, at least 50%, 51%, 52%, 53%, 54%, 55%, 56%, 57%, 58%, 59%, 60%, 61%, 62%, 63%, 64%, 65%, 66%, 67%, 68%, 69%, 70%, 71%, 72%, 73%, 74%, 75%, 76%, 77%, 78%, 79%, 80%, 81%, 82%, 83%, 84%, 85%, 86%, 87%, 88%, 89%, 90%, 91%, 92%, 93%, 94%, 95%, 96%, 97%, 98%, or 99% sequence identity to the amino acid sequence represented by SEQ ID NO: 307 and any of the other amino acid sequences in Tables A4 and preferably conferring enhanced yield-related traits relative to control plants.
   [0594] (iii) derivatives of any of the amino acid sequences given in (i) or (ii) above.

### 5. GR-RBP (Glycine Rich-RNA Binding Protein) Polypeptides

[0595] 1. A method for enhancing yield-related traits in plants relative to control plants, comprising modulating expression in a plant of a nucleic acid encoding a Glycine-Rich RNA Binding Protein (GR-RBP polypeptide), wherein said GR-RBP polypeptide comprises a RNA Recognition Motif 1 (PFam accession PF00076, RRM_{—}1).
[0596] 2. Method according to item 1, wherein said GR-RBP polypeptide comprises one or more of the signature sequences or motifs given in SEQ ID NO: 828 to SEQ ID NO: 837.
[0597] 3. Method according to item 1 or 2, wherein said modulated expression is effected by introducing and expressing in a plant a nucleic acid encoding a GR-RBP polypeptide.
[0598] 4. Method according to any one of items 1 to 3, wherein said nucleic acid encoding a GR-RBP polypeptide encodes any one of the proteins listed in Table A5 or is a portion of such a nucleic acid, or a nucleic acid capable of hybridising with such a nucleic acid.
[0599] 5. Method according to any one of items 1 to 4, wherein said nucleic acid sequence encodes an orthologue or paralogue of any of the proteins given in Table A5.
[0600] 6. Method according to any preceding item, wherein said enhanced yield-related traits comprise increased early vigour and/or increased yield, preferably increased biomass and/or increased seed yield relative to control plants.
[0601] 7. Method according to any one of items 1 to 6, wherein said enhanced yield-related traits are obtained under conditions of drought stress.
[0602] 8. Method according to any one of items 1 to 6, wherein said enhanced yield-related traits are obtained under non-stress conditions.
[0603] 9. Method according to any one of items 3 to 8, wherein said nucleic acid is operably linked to a constitutive promoter, preferably to a GOS2 promoter, most preferably to a GOS2 promoter from rice.
[0604] 10. Method according to any one of items 1 to 9, wherein said nucleic acid encoding a GR-RBP polypeptide is of plant origin, preferably from a monocotyledonous plant, further preferably from the family Poaceae, more preferably from the genus Oryza, most preferably from Oryza sativa.
[0605] 11. Plant or part thereof, including seeds, obtainable by a method according to any one of items 1 to 10, wherein said plant or part thereof comprises a recombinant nucleic acid encoding a GR-RBP polypeptide.
[0606] 12. Construct comprising:
   [0607] (i) nucleic acid encoding a GR-RBP polypeptide as defined in items 1 or 2;
   [0608] (ii) one or more control sequences capable of driving expression of the nucleic acid sequence of (a); and optionally
   [0609] (iii) a transcription termination sequence.
[0610] 13. Construct according to item 12, wherein one of said control sequences is a constitutive promoter, preferably a GOS2 promoter, most preferably a GOS2 promoter from rice.
[0611] 14. Use of a construct according to item 12 or 13 in a method for making plants having increased yield, particularly increased biomass and/or increased seed yield relative to control plants.
[0612] 15. Plant, plant part or plant cell transformed with a construct according to item 12 or 13.
[0613] 16. Method for the production of a transgenic plant having increased yield, particularly increased biomass and/or increased seed yield relative to control plants, comprising:
   [0614] (i) introducing and expressing in a plant a nucleic acid encoding a GR-RBP polypeptide as defined in item 1 or 2; and
   [0615] (ii) cultivating the plant cell under conditions promoting plant growth and development.
[0616] 17. Transgenic plant having increased yield, particularly increased early vigour, increased biomass and/or increased seed yield, relative to control plants, resulting from modulated expression of a nucleic acid encoding a GR-RBP polypeptide as defined in item 1 or 2, or a transgenic plant cell derived from said transgenic plant.
[0617] 18. Transgenic plant according to item 11, 15 or 17, or a transgenic plant cell derived thereof, wherein said plant is a crop plant or a monocot or a cereal, such as rice, maize, wheat, barley, millet, rye, triticale, sorghum emmer, spelt, secale, einkorn, teff, milo and oats.
[0618] 19. Harvestable parts of a plant according to item 18, wherein said harvestable parts are preferably shoot biomass and/or seeds.
[0619] 20. Products derived from a plant according to item 18 and/or from harvestable parts of a plant according to item 19.
[0620] 21. Use of a nucleic acid encoding a GR-RBP polypeptide in increasing yield, particularly in increasing early vigour, seed yield and/or shoot biomass in plants, relative to control plants.
[0621] 22. An isolated nucleic acid molecule selected from:
   [0622] (i) a nucleic acid represented by any of SEQ ID NO: 848, 849, 851, 852, 853, 854, 857, 862, 873, 874, 875, 876, 878, 879, 893, 897, 898, 900, 901, 905, 928, 931, 932, 933, 934, 937;
   [0623] (ii) the complement of a nucleic acid represented by any of SEQ ID NO: 848, 849, 851, 852, 853, 854, 857, 862, 873, 874, 875, 876, 878, 879, 893, 897, 898, 900, 901, 905, 928, 931, 932, 933, 934, 937;
   [0624] (iii) a nucleic acid encoding a GR-RBP polypeptide having, in increasing order of preference, at least 50%, 55%, 60%, 65%, 70%, 75%, 80%, 85%, 90%, 95%, 96%, 97%, 98%, 99% or more sequence identity to the amino acid sequences represented by any of SEQ ID NO: 945, 946, 948, 949, 950, 951, 854, 959, 970, 971, 972, 973, 975, 976, 990, 994, 995, 997, 998, 1002, 1025, 1028, 1029, 1030, 1031, 1034, and comprising signature sequence 3 (SEQ ID NO: 830) and signature sequence 4 (SEQ ID NO: 831).
[0625] 23. An isolated polypeptide selected from:
   [0626] (i) an amino acid sequence represented by any of SEQ ID NO: 945, 946, 948, 949, 950, 951, 854, 959, 970, 971, 972, 973, 975, 976, 990, 994, 995, 997, 998, 1002, 1025, 1028, 1029, 1030, 1031, 1034;
   [0627] (ii) an amino acid sequence having, in increasing order of preference, at least 50%, 55%, 60%, 65%, 70%, 75%, 80%, 85%, 90%, 95%, 96%, 97%, 98%, 99% or more sequence identity to the amino acid sequences represented by any one of SEQ ID NO: 945, 946, 948, 949, 950, 951, 854, 959, 970, 971, 972, 973, 975, 976, 990, 994, 995, 997, 998, 1002, 1025, 1028, 1029, 1030, 1031, 1034, and comprising signature sequence 3 (SEQ ID NO: 830) and signature sequence 4 (SEQ ID NO: 831);
   [0628] (iii) derivatives of any of the amino acid sequences given in (i) or (ii) above.

### DESCRIPTION OF FIGURES

[0629] The present invention will now be described with reference to the following figures in which:

[0630] FIG. 1 is a multiple alignment of C3H-like polypeptide squences. Alignment of polypeptide sequences was performed using the ClustalW 2.0 algorithm of progressive alignment (Thompson et al. (1997) Nucleic Acids Res 25:4876-4882; Chema et al. (2003). Nucleic Acids Res 31:3497-3500) with standard setting (slow alignment, similarity matrix: Gonnet, gap opening penalty 10, gap extension penalty: 0.2). Minor manual editing was done to further optimise the alignment.

[0631] FIG. 2 shows a phylogenetic tree. The phylogenetic tree was constructed using a neighbour-joining clustering algorithm as provided in the AlignX programme from the Vector NTI (Invitrogen).

[0632] FIG. 3 represents the binary vector used for increased expression in Oryza sativa of a C3H-like-encoding nucleic acid under the control of a rice GOS2 promoter (pGOS2).

[0633] FIG. 4 shows a multiple alignment. Alignment of polypeptide sequences was performed using the ClustalW 2.0 algorithm of progressive alignment (Thompson et al. (1997) Nucleic Acids Res 25:4876-4882; Chema et al. (2003). Nucleic Acids Res 31:3497-3500) with standard setting (slow alignment, similarity matrix: Gonnet, gap opening penalty 10, gap extension penalty: 0.2). Minor manual editing was done to further optimise the alignment.

[0634] FIG. 5 shows a phylogenetic tree of SPT-like polypeptides. The tree was constructed using a neighbour-joining clustering algorithm as provided in the AlignX programme from the Vector NTI (Invitrogen).

[0635] FIG. 6 represents the binary vector used for increased expression in Oryza sativa of an SPT-like-encoding nucleic acid under the control of a rice GOS2 promoter (pGOS2).

[0636] FIG. 7 represents the domain structure of SEQ ID NO: 140 with the IF-2B (PF01008) domain indicated in italics and the conserved motifs 4 to 6 underlined.

[0637] FIG. 8 represents a multiple alignment of IDI2 polypeptides from the A and B group.

[0638] FIG. 9 shows phylogenetic tree of IDI2 polypeptides, SEQ ID NO: 140 corresponds to Saccof_IDI2 in the A group. The sequences were aligned using MAFFT and were visualised with Dendroscope (Huson et al. (2007), BMC Bioinformatics 8(1):460). The corresponding SEQ ID Nos can be found in Table A3.

[0639] FIG. 10 represents the binary vector used for increased expression in Oryza sativa of an IDI2-encoding nucleic acid under the control of a rice GOS2 promoter (pGOS2)

[0640] FIG. 11 represents the composition eIF4F polypeptide with its main subunits eIF4G, eIF4E and eIF4A.

[0641] FIG. 12 represents the circular phylogram of selected eIF4G and isoG proteins. The proteins were aligned using MUSCLE 3.7 (Edgar (2004), Nucleic Acids Research 32(5): 1792-97). A neighbor-joining tree was calculated using QuickTree 1.1 (Howe et al. (2002), Bioinformatics 18(11): 1546-7). Support of the major branching after 100 bootstrap repetitions is indicated. A circular phylogram was drawn using Dendroscope 2.0.1 (Huson et al. (2007), BMC Bioinformatics 8(1):460). O. sativa eIF4 isoG, indicated in bold black.

[0642] FIG. 13 shows the phylogenetic tree of selected eIF4E and isoE proteins. The alignment was generated using MAFFT (Katoh and Toh (2008) Briefings in Bioinformatics 9:286-298). A neighbour-joining tree was calculated using QuickTree (Howe et al. (2002), Bioinformatics 18(11): 1546-7), 100 bootstrap repetitions. The circular phylogram was drawn using Dendroscope (Huson et al. (2007), BMC Bioinformatics 8(1):460). Confidence for 100 bootstrap repetitions is indicated for major branching. See the sequence listing for species abbreviations.

[0643] FIG. 14 represents the phylogenetic tree of selected eIF4A polypeptides. The alignment was generated using MAFFT (Katoh and Toh (2008) Briefings in Bioinformatics 9:286-298). A neighbour-joining tree was calculated using QuickTree (Howe et al. (2002), Bioinformatics 18(11): 1546-7), 100 bootstrap repetitions. The circular phylogram was drawn using Dendroscope (Huson et al. (2007), BMC Bioinformatics 8(1):460). Confidence for 100 bootstrap repetitions is indicated for major branching. See the sequence listing for species abbreviations.

[0644] FIG. 15 represents the binary vector used for increased expression in Oryza sativa of an eIF4 isoG or eIF4A encoding nucleic acid under the control of a rice GOS2 promoter (pGOS2).

[0645] FIG. 16 represents the domain structure of SEQ ID NO: 827 with the conserved RRM_{—}1 domain (PF00076, in bold italics) and the gly-rich region in bold. The GGYGG and GGYG signature sequences are underlined.

[0646] FIG. 17 represents a multiple alignment of various GR-RBP polypeptides constructed using VNTI. Conserved amino acids are shaded and a consensus sequences is reproduced below the alignment.

[0647] FIG. 18 shows phylogenetic tree of GR-RBP polypeptides, SEQ ID NO: 827 (boxed) is part of Glade A. The sequences were aligned using MAFFT and were visualised with Dendroscope (Huson et al. (2007), BMC Bioinformatics 8(1):460).

[0648] FIG. 19 represents the binary vector used for increased expression in Oryza sativa of a GR-RBP-encoding nucleic acid under the control of a rice GOS2 promoter (pGOS2).

### EXAMPLES

[0649] The present invention will now be described with reference to the following examples, which are by way of illustration alone. The following examples are not intended to completely define or otherwise limit the scope of the invention.

[0650] DNA manipulation: unless otherwise stated, recombinant DNA techniques are performed according to standard protocols described in (Sambrook (2001) Molecular Cloning: a laboratory manual, 3rd Edition Cold Spring Harbor Laboratory Press, CSH, New York) or in Volumes 1 and 2 of Ausubel et al. (1994), Current Protocols in Molecular Biology, Current Protocols. Standard materials and methods for plant molecular work are described in Plant Molecular Biology Labfax (1993) by R. D. D. Croy, published by BIOS Scientific Publications Ltd (UK) and Blackwell Scientific Publications (UK).

### Example 1

### Identification of Sequences Related to the Nucleic Acid Sequence Used in the Methods of the Invention

[0651] Sequences (full length cDNA, ESTs or genomic) related to SEQ ID NO: 1 and SEQ ID NO: 2 were identified amongst those maintained in the Entrez Nucleotides database at the National Center for Biotechnology Information (NCBI) using database sequence search tools, such as the Basic Local Alignment Tool (BLAST) (Altschul et al. (1990) J. Mol. Biol. 215:403-410; and Altschul et al. (1997) Nucleic Acids Res. 25:3389-3402). The program finds regions of local similarity between sequences by comparing nucleic acid or polypeptide sequences to sequence databases and by calculating the statistical significance of matches. For example, the polypeptide encoded by SEQ ID NO: 1 was used for the TBLASTN algorithm, with default settings and the filter to ignore low complexity sequences set off. The output of the analysis was viewed by pairwise comparison, and ranked according to the probability score (E-value), where the score reflect the probability that a particular alignment occurs by chance (the lower the E-value, the more significant the hit). In addition to E-values, comparisons were also scored by percentage identity. Percentage identity refers to the number of identical nucleotides (or amino acids) between the two compared nucleic acid (or polypeptide) sequences over a particular length. In some instances, the default parameters may be adjusted to modify the stringency of the search. For example the E-value may be increased to show less stringent matches. This way, short nearly exact matches may be identified.

### 1.1. C3H-Like Polypeptides

[0652] Table A1 provides a list of nucleic acid sequences related to SEQ ID NO: 1 and SEQ ID NO: 2.

TABLE A1
Examples of C3H-like sequences:

| | | Nucleic | |
|---|---|---|---|
| | | acid | Polypeptide |
| Name | Organism | SEQ ID NO: | SEQ ID NO: |
| M_truncatula_AC135467_2_5_CDS | Medicago truncatula | 1 | 2 |
| A_cepa_TC4713 | Allium cepa | 3 | 4 |
| A_thaliana_AT3G46620_1 | Arabidopsis thaliana | 5 | 6 |
| A_thaliana_AT5G59550_1 | Arabidopsis thaliana | 7 | 8 |
| B_napus_TC85754 | Brassica napus | 9 | 10 |
| C_clementina_DY266223 | Citrus clementina | 11 | 12 |
| C_clementina_TC3900 | Citrus clementina | 13 | 14 |
| C_longa_TA1491_136217 | Curcuma longa | 15 | 16 |
| C_longa_TA268_136217 | Curcuma longa | 17 | 18 |
| C_sinensis_TC458 | Citrus sinensis | 19 | 20 |
| F_vesca_TA10341_57918 | Fragaria vesca | 21 | 22 |
| G_hirsutum_TC105257 | Gossypium hirsutum | 23 | 24 |
| G_hirsutum_TC82591 | Gossypium hirsutum | 25 | 26 |
| G_hirsutum_TC85784 | Gossypium hirsutum | 27 | 28 |
| G_hirsutum_TC92683 | Gossypium hirsutum | 29 | 30 |
| G_hirsutum_TC93828 | Gossypium hirsutum | 31 | 32 |
| G_max_Glyma11g14580_1 | Glycine max | 33 | 34 |
| G_max_Glyma11g34160_1 | Glycine max | 35 | 36 |
| G_max_Glyma12g06460_1 | Glycine max | 37 | 38 |
| G_max_Glyma13g41340_1 | Glycine max | 39 | 40 |
| G_max_Glyma15g04080_1 | Glycine max | 41 | 42 |
| G_max_Glyma18g04140_1 | Glycine max | 43 | 44 |
| G_max_Glyma18g40130_1 | Glycine max | 45 | 46 |
| G_raimondii_TC6392 | Gossypium raimondii | 47 | 48 |
| L_japonicus_TC26018 | Lotus japonica | 49 | 50 |
| L_sativa_TC27450 | Lactuca sativa | 51 | 52 |
| M_esculenta_TA5606_3983 | Manihot esculenta | 53 | 54 |
| M_truncatula_AC157503_6_4 | Medicago truncatula | 55 | 56 |
| N_benthamiana_TC11136 | Nicotiana benthamiana | 57 | 58 |
| N_benthamiana_TC12970 | Nicotiana benthamiana | 59 | 60 |
| N_tabacum_TC16005 | Nicotiana tabacum | 61 | 62 |
| O_sativa_LOC_Os05g01940_1 | Oryza sativa | 63 | 64 |
| P_trichocarpa_560785 | Populus trichocarpa | 65 | 66 |
| P_trichocarpa_765468 | Populus trichocarpa | 67 | 68 |
| P_trifoliata_TA5973_37690 | Poncirus trifoliata | 69 | 70 |
| R_communis_EE259446 | Ricinus communis | 71 | 72 |
| R_communis_TA1159_3988 | Ricinus communis | 73 | 74 |
| R_communis_TA1782_3988 | Ricinus communis | 75 | 76 |
| R_communis_TA1803_3988 | Ricinus communis | 77 | 78 |
| S_bicolor_Sb09g001100_1 | Sorghum bicolor | 79 | 80 |
| S_tuberosum_TC193013 | Solanum tuberosum | 81 | 82 |
| V_vinifera_GSVIVT00021348001 | Vitis vinifera | 83 | 84 |
| Z_mays_TC391585 | Zea mays | 85 | 86 |
| Z_mays_ZM07MC00480_BFb0175C11 | Zea mays | 87 | 88 |
| Z_mays_ZM07MC34672_BFb0353B17 | Zea mays | 89 | 90 |
| Z_officinale_TA1620_94328 | Zingiber officinale | 91 | 92 |

[0653] In some instances, related sequences have tentatively been assembled and publicly disclosed by research institutions, such as The Institute for Genomic Research (TIGR; beginning with TA). The Eukaryotic Gene Orthologs (EGO) database may be used to identify such related sequences, either by keyword search or by using the BLAST algorithm with the nucleic acid sequence or polypeptide sequence of interest. In other instances, special nucleic acid sequence databases have been created for particular organisms, such as by the Joint Genome Institute. Further, access to proprietary databases, has allowed the identification of novel nucleic acid and polypeptide sequences.

### 1.2. SPATULA-Like (SPT) Polypeptides

[0654] Table A2 provides a list of sequences related to SEQ ID NO: 96 and SEQ ID NO: 97

TABLE A2
Examples of SPT-like sequences:

| | | Nucleic | |
|---|---|---|---|
| | | acid | |
| | | SEQ ID | Polypeptide |
| Name | Source organism | NO: | SEQ ID NO: |
| Poptr_SPT | Populus trichocarpa | 96 | 97 |
| Arath_SPT | Arabidopsis thaliana | 98 | 99 |
| Brana_SPT | Brassica napus | 100 | 101 |
| Carpa_SPT | Carica papaya | 102 | 103 |
| Cicle_SPT | Citrus clementina | 104 | 105 |
| Escca_SPT | Eschscholzia californica | | 106 |
| Fra x ana_SPT_{—} | Fragaria x ananassa | 107 | 108 |
| Glyma_SPT_{—} | Glycine max | 109 | 110 |
| Goshi_SPT | Gossypium hirsutum | 111 | 112 |
| Medtr_SPT | Medicago truncatula | 113 | 114 |
| Nicta_SPT | Nicotiana tabacum | 115 | 116 |
| Solly_SPT | Solanium lycopersicum | 117 | 118 |
| Vinvi_SPT | Vitis vinifera | 119 | 120 |
| Glyma_SPT like 1 | Glycine max | 121 | 122 |
| Glyma_SPT like 2 | Glycine max | 123 | 124 |
| Solly_SPT like 1 | Solanium lycopersicum | 125 | 126 |
| Solly_SPT like 2 | Solanium lycopersicum | 127 | 128 |
| Orysa_SPT like | Oryza sativa | 129 | 130 |
| Arath_ALC | Arabidopsis thaliana | 131 | 132 |

[0655] In some instances, related sequences have tentatively been assembled and publicly disclosed by research institutions, such as The Institute for Genomic Research (TIGR; beginning with TA). The Eukaryotic Gene Orthologs (EGO) database may be used to identify such related sequences, either by keyword search or by using the BLAST algorithm with the nucleic acid sequence or polypeptide sequence of interest. On other instances, special nucleic acid sequence databases have been created for particular organisms, such as by the Joint Genome Institute.

### 1.3. IDI2 (Iron Deficiency Induced 2) Polypeptides

[0656] Table A3 provides a list of nucleic acid sequences related to the nucleic acid sequence used in the methods of the present invention.

TABLE A3
Examples of IDI2 polypeptides:

| | Nucleic | |
|---|---|---|
| | acid | |
| | SEQ | Polypeptide |
| Plant Source | ID NO: | SEQ ID NO: |
| Saccharum officinarum IDI2 | 139 | 140 |
| Chlorella 140697 | 150 | 195 |
| Hordeum vulgare TA31842_4513 | 151 | 196 |
| Ostreococcus RCC809 | 152 | 197 |
| Oryza sativa BGIOSIBCE033922 | 153 | 198 |
| Oryza sativa BGIOSIBSE037940 | 154 | 199 |
| Oyrza sativa CR292756 | 155 | 200 |
| Oyryza sativa CX116019 | 156 | 201 |
| Oryza sativa Os11g0216900 | 157 | 202 |
| Ostreococcus taurii 8569 | 158 | 203 |
| Pinus pinaster TA4183_71647 | 159 | 204 |
| Phaeodactylum tricornutum 23811 | 160 | 205 |
| Sorghum bicolour Sb05g008680.1 | 161 | 206 |
| Sorghum bicolour VTA25485_4558 | 162 | 207 |
| Saccharum officinarum TA35690_4547 | 163 | 208 |
| Triticum aestivum c54899571@13348 | 164 | 209 |
| Triticum aestivum CV772651 | 165 | 210 |
| Triticum aestivum TA67133_4565 | 166 | 211 |
| Thalassiosira pseudonana 35896 | 167 | 212 |
| Volvox carteri 59470 | 168 | 213 |
| Zea mays c57808725gm030403@2572 | 169 | 214 |
| Zea mays DQ244248 | 170 | 215 |
| Zea mays ZM07MC01636_57808725@1630 | 171 | 216 |
| Arabidopsis thaliana AT2G05830.1 | 172 | 217 |
| Brassica napus DY025654 | 173 | 218 |
| Citrus clementina DY262513 | 174 | 219 |
| Citrus clementina DY262587 | 175 | 220 |
| Citrus clementina DY263526 | 176 | 221 |
| Citrus clementina DY268933 | 177 | 222 |
| Citrus clementina TA2451_85681 | 178 | 223 |
| Carthamus tinctorius TA325_4222 | 179 | 224 |
| Glycine max Glyma09g08190.1 | 180 | 225 |
| Helianthus tuberosus TA3030_4233 | 181 | 226 |
| Ipomoea nil CJ747673 | 182 | 227 |
| Lactuca virosa TA2328_75947 | 183 | 228 |
| Phyllostachys nigra TA2942_3691 | 184 | 229 |
| Populus trichocarpa 832064 | 185 | 230 |
| Populus trichocarpa scaff_VI.1535 | 186 | 231 |
| Vitis shuttleworthii CN604099 | 187 | 232 |
| Vitis vinifera GSVIVT00016416001 | 188 | 233 |
| Vitis vinifera TA40906_29760 | 189 | 234 |
| Aquilegia formosa x pubescens TA9033_338618 | 190 | 235 |
| Gossypium hirsutum TA24273_3635 | 191 | 236 |
| Gossypium raimondii TA11759_29730 | 192 | 237 |
| Nicotiana tabacum TA17086_4097 | 193 | 238 |
| Solanum tuberosum TA31637_4113 | 194 | 239 |

[0657] In some instances, related sequences have tentatively been assembled and publicly disclosed by research institutions, such as The Institute for Genomic Research (TIGR; beginning with TA). The Eukaryotic Gene Orthologs (EGO) database may be used to identify such related sequences, either by keyword search or by using the BLAST algorithm with the nucleic acid sequence or polypeptide sequence of interest. On other instances, special nucleic acid sequence databases have been created for particular organisms, such as by the Joint Genome Institute. Further, access to proprietary databases, has allowed the identification of novel nucleic acid and polypeptide sequences.

1.4. eIF4F-Like Protein Complex

[0658] Tables A4a, A4b and A4c provide a list of nucleic acid sequences related to the nucleic acid sequence used in the methods of the present invention. Table(s) A4, as referred herein, means anyone or more of Tables A4a, A4b and A4c.

TABLE A4a
Examples of eIF4isoG-like polypeptides:

| | Nucleic acid | Polypeptide |
|---|---|---|
| Name | SEQ ID NO: | SEQ ID NO: |
| O. sativa_eIF4isoG | 240 | 241 |
| A. thaliana_AT5G57870.1 | 242 | 243 |
| G. max_Gm0025x00623 | 244 | 245 |
| G. max_Gm0071x00063 | 246 | 247 |
| M. truncatula_AC140546_1.5 | 248 | 249 |
| O. sativa_Os02g0611500 | 250 | 251 |
| P. trichocarpa_835841 | 252 | 253 |
| P. trichocarpa_835945 | 254 | 255 |
| R. communis_TA1365_3988 | 256 | 257 |
| S. bicolor_5286647 | 258 | 259 |
| S. tuberosum_TA26995_4113 | 260 | 261 |
| T. aestivum_TA60686_4565 | 262 | 263 |
| V. vinifera_GSVIVT00017187001 | 264 | 265 |
| V. vinifera_GSVIVT00032790001 | 266 | 267 |
| A. thaliana_AT3G60240.2 | 268 | 269 |
| G. max_Gm0072x00069 | 270 | 271 |
| G. max_Gm0119x00255 | 272 | 273 |
| M. truncatula_AC153354_6.5 | 274 | 275 |
| O. sativa_LOC_Os07g36940.1 | 276 | 277 |
| P. trichocarpa_scaff_40.82 | 278 | 279 |
| P. trichocarpa_scaff_II.1294 | 280 | 281 |
| V. vinifera_GSVIVT00019025001 | 282 | 283 |
| C. reinhardtii_147254 | 284 | 285 |
| Chlorella_142387 | 286 | 287 |
| P. patens_183347 | 288 | 289 |
| S. moellendorffii_437322 | 290 | 291 |
| V. carteri_103732 | 292 | 293 |
| O. RCC809_60557 | 294 | 295 |
| O. taurii_23433 | 296 | 297 |
| A. thaliana_AT2G24050.1 | 298 | 299 |

TABLE A4b
Examples of eIF4A-like polypeptides:

| | Nucleic acid | Polypeptide |
|---|---|---|
| Name | SEQ ID NO: | SEQ ID NO: |
| O. sativa_LOC_Os06g48750.1-mutant | 300 | 301 |
| O. sativa_LOC_Os06g48750.1 | 302 | 303 |
| O. sativa_LOC_Os02g05330.1 | 304 | 305 |
| A. aestivalis_676 | 306 | 307 |
| A. cepa_TA4214_4679 | 308 | 309 |
| A. formosa_x_pubescens_TA10474_338618 | 310 | 311 |
| A. formosa_x_pubescens_TA9867_338618 | 312 | 313 |
| A. officinalis_TA1117_4686 | 314 | 315 |
| A. thaliana_AT1G54270.1 | 316 | 317 |
| A. thaliana_AT1G72730.1 | 318 | 319 |
| A. thaliana_AT3G13920.1 | 320 | 321 |
| B. napus_TA25077_3708 | 322 | 323 |
| B. oleracea_TA5257_3712 | 324 | 325 |
| B. oleracea_TA5508_3712 | 326 | 327 |
| C. canephora_TA6150_49390 | 328 | 329 |
| C. reinhardtii_188942 | 330 | 331 |
| C. richardii_TA518_49495 | 332 | 333 |
| C. rumphii_TA1001_58031 | 334 | 335 |
| C. sinensis_TA11500_2711 | 336 | 337 |
| C. sinensis_TA12133_2711 | 338 | 339 |
| Citrus_x_paradisi_x_Poncirus_trifoliata_TA2371_309804 | 340 | 341 |
| E. huxleyi_413872 | 342 | 343 |
| F. vesca_TA10930_57918 | 344 | 345 |
| F. vesca_TA9647_57918 | 346 | 347 |
| G. hirsutum_TA20166_3635 | 348 | 349 |
| G. max_Gm0010x00368.1 | 350 | 351 |
| G. max_Gm0025x00441 | 352 | 353 |
| G. max_Gm0026x00612 | 354 | 355 |
| G. raimondii_TA10187_29730 | 356 | 357 |
| H. brasiliensis_TA107_3981 | 358 | 359 |
| H. exilis_TA612_400408 | 360 | 361 |
| H. vulgare_TA29331_4513 | 362 | 363 |
| L. japonicus_TA1252_34305 | 364 | 365 |
| L. japonicus_TA494_34305 | 366 | 367 |
| L. perennis_TA1391_43195 | 368 | 369 |
| L. sativa_TA1046_4236 | 370 | 371 |
| M. crystallinum_TA3938_3544 | 372 | 373 |
| M. domestica_TA24974_3750 | 374 | 375 |
| M. esculenta_TA5134_3983 | 376 | 377 |
| M. polymorpha_TA364_3197 | 378 | 379 |
| M. truncatula_AC136955_3.5 | 380 | 381 |
| M. truncatula_TA20612_3880 | 382 | 383 |
| Micromonas_TA67_392814 | 384 | 385 |
| N. benthamiana_TA9701_4100 | 386 | 387 |
| N. tabacum_TA13194_4097 | 388 | 389 |
| N. tabacum_TA14720_4097 | 390 | 391 |
| N. tabacum_X79004 | 392 | 393 |
| O. lucimarinus_32748 | 394 | 395 |
| O. taurii_28625 | 396 | 397 |
| P. abies_TA1392_3329 | 398 | 399 |
| P. deltoides_TA2215_3696 | 400 | 401 |
| P. engelmannii_x_glauca_TA4735_373101 | 402 | 403 |
| P. glauca_TA14843_3330 | 404 | 405 |
| P. glauca_TA15121_3330 | 406 | 407 |
| P. glaucum_TA261_4543 | 408 | 409 |
| P. patens_233331 | 410 | 411 |
| P. persica_TA3219_3760 | 412 | 413 |
| P. persica_TA4099_3760 | 414 | 415 |
| P. sativum_AY167671 | 416 | 417 |
| P. sitchensis_TA10673_3332 | 418 | 419 |
| P. taeda_TA1570_3352 | 420 | 421 |
| P. taeda_TA1624_3352 | 422 | 423 |
| P. taeda_TA6267_3352 | 424 | 425 |
| P. tremuloides_TA2301_3693 | 426 | 427 |
| P. trichocarpa_645764 | 428 | 429 |
| P. tricornutum_25743 | 430 | 431 |
| P. vulgaris_TA3080_3885 | 432 | 433 |
| S. bicolor_5283853 | 434 | 435 |
| S. bicolor_5291391 | 436 | 437 |
| S. henryi_TA238_13258 | 438 | 439 |
| S. lycopersicum_TA36357_4081 | 440 | 441 |
| S. moellendorffii_116103 | 442 | 443 |
| S. moellendorffii_143895 | 444 | 445 |
| S. propinquum_TA3625_132711 | 446 | 447 |
| S. tuberosum_TA24247_4113 | 448 | 449 |
| T. aestivum_TA61187_4565 | 450 | 451 |
| T. pratense_TA857_57577 | 452 | 453 |
| T. pseudonana_9716 | 454 | 455 |
| V. carteri_120953 | 456 | 457 |
| V. riparia_TA568_96939 | 458 | 459 |
| V. shuttleworthii_TA1952_246827 | 460 | 461 |
| V. vinifera_GSVIVT00032180001 | 462 | 463 |
| V. vinifera_TA37483_29760 | 464 | 465 |
| W. mirabilis_TA508_3377 | 466 | 467 |
| Z. mays_TA10949_4577999 | 468 | 469 |
| Z. mays_TA169666_4577 | 470 | 471 |
| Z. officinale_TA1475_94328 | 472 | 473 |
| A. anophagefferens_58937 | 474 | 475 |
| A. anophagefferens_70371 | 476 | 477 |
| A. formosa_x_pubescens_TA10839_338618 | 478 | 479 |
| A. formosa_x_pubescens_TA12575_338618 | 480 | 481 |
| A. formosa_x_pubescens_TA18893_338618 | 482 | 483 |
| A. thaliana_AT1G51380.1 | 484 | 485 |
| A. thaliana_AT3G19760.1 | 486 | 487 |
| C. reinhardtii_608 | 488 | 489 |
| C. sinensis_TA12419_2711 | 490 | 491 |
| Chlorella_29172 | 492 | 493 |
| Citrus_x_paradisi_x_Poncirus_trifoliata_TA3394_309804 | 494 | 495 |
| E. huxleyi_451926 | 496 | 497 |
| G. hirsutum_TA21351_3635 | 498 | 499 |
| G. max_Gm0120x00197 | 500 | 501 |
| G. raimondii_TA11359_29730 | 502 | 503 |
| H. vulgare_TA35263_4513 | 504 | 505 |
| L. serriola_TA2428_75943 | 506 | 507 |
| M. truncatula_TA22494_3880 | 508 | 509 |
| N. tabacum_TA14127_4097 | 510 | 511 |
| O. basilicum_TA2248_39350 | 512 | 513 |
| O. lucimarinus_26958 | 514 | 515 |
| O. RCC809_27976 | 516 | 517 |
| O. sativa_LOC_Os01g45190.1 | 518 | 519 |
| O. sativa_LOC_Os03g36930.1 | 520 | 521 |
| O. taurii_20289 | 522 | 523 |
| P. patens_109347 | 524 | 525 |
| P. patens_60709 | 526 | 527 |
| P. sativum_Y17186 | 528 | 529 |
| P. taeda_TA11536_3352 | 530 | 531 |
| P. taeda_TA13727_3352 | 532 | 533 |
| P. trichocarpa_832316 | 534 | 535 |
| P. trichocarpa_TA24057_3694 | 536 | 537 |
| P. tricornutum_41785 | 538 | 539 |
| R. communis_TA1264_3988 | 540 | 541 |
| S. bicolor_5285388 | 542 | 543 |
| S. lycopersicum_TA39656_4081 | 544 | 545 |
| S. moellendorffii_164382 | 546 | 547 |
| S. officinarum_TA29446_4547 | 548 | 549 |
| S. tuberosum_TA27838_4113 | 550 | 551 |
| T. aestivum_TA68913_4565 | 552 | 553 |
| T. pseudonana_354 | 554 | 555 |
| V. vinifera_GSVIVT00037338001 | 556 | 557 |
| Z. mays_TA13571_4577999 | 558 | 559 |

TABLE A4C
Examples of eIF4isoE-like polypeptides:

| | Nucleic acid | Polypeptide |
|---|---|---|
| Name | SEQ ID NO: | SEQ ID NO: |
| A. thaliana_AT1G29590.1#1 | 560 | 561 |
| A. thaliana_AT4G18040.1#1 | 562 | 563 |
| O. sativa_LOC_Os10g32970.1#1 | 564 | 565 |
| O. sativa_LOC_Os01g73880.1#1 | 566 | 567 |
| A. thaliana_AT1G29550.1#1 | 568 | 569 |
| B. napus_TA35293_3708#1 | 570 | 571 |
| B. rapa_DY010188#1 | 572 | 573 |
| B. rapa_TA7617_3711#1 | 574 | 575 |
| C. annuum_TA4459_4072#1 | 576 | 577 |
| C. clementina_TA6340_85681#1 | 578 | 579 |
| C. endivia_TA2025_114280#1 | 580 | 581 |
| C. intybus_TA694_13427#1 | 582 | 583 |
| C. maculosa_TA364_215693#1 | 584 | 585 |
| C. maculosa_TA5711_215693#1 | 586 | 587 |
| C. sinensis_TA13750_2711#1 | 588 | 589 |
| C. solstitialis_EH773887#1 | 590 | 591 |
| C. tinctorius_TA5460_4222#1 | 592 | 593 |
| E. esula_TA10897_3993#1 | 594 | 595 |
| F. vesca_TA13426_57918#1 | 596 | 597 |
| G. hirsutum_TA27730_3635#1 | 598 | 599 |
| G. hybrid_TA3072_18101#1 | 600 | 601 |
| G. max_Gm0030x00263#1 | 602 | 603 |
| G. raimondii_CO095282#1 | 604 | 605 |
| H. annuus_DY913126#1 | 606 | 607 |
| H. annuus_TA12162_4232#1 | 608 | 609 |
| H. annuus_TA15745_4232#1 | 610 | 611 |
| H. paradoxus_EL473808#1 | 612 | 613 |
| H. paradoxus_EL478502#1 | 614 | 615 |
| H. petiolaris_DY950915#1 | 616 | 617 |
| H. vulgare_gi_24285258#1 | 618 | 619 |
| I. nil_TA6867_35883#1 | 620 | 621 |
| L. perennis_TA3336_43195#1 | 622 | 623 |
| L. saligna_TA2850_75948#1 | 624 | 625 |
| L. sativa_TA3652_4236#1 | 626 | 627 |
| L. serriola_TA2077_75943#1 | 628 | 629 |
| L. virosa_DW170719#1 | 630 | 631 |
| M. domestica_TA27491_3750#1 | 632 | 633 |
| M. esculenta_TA8185_3983#1 | 634 | 635 |
| M. truncatula_AC183923_21.4#1 | 636 | 637 |
| N. tabacum_TA15108_4097#1 | 638 | 639 |
| N. tabacum_TA15811_4097#1 | 640 | 641 |
| N. tabacum_TA18292_4097#1 | 642 | 643 |
| P. deltoides_TA3856_3696#1 | 644 | 645 |
| P. persica_TA3622_3760#1 | 646 | 647 |
| P. sativum_TA561_3888#1 | 648 | 649 |
| P. trichocarpa_660574#1 | 650 | 651 |
| R. hybrid_TA805_128735#1 | 652 | 653 |
| S. bicolor_5283641#1 | 654 | 655 |
| S. habrochaites_TA2269_62890#1 | 656 | 657 |
| S. habrochaites_TA2286_62890#1 | 658 | 659 |
| S. lycopersicum_TA41869_4081#1 | 660 | 661 |
| S. lycopersicum_TA46570_4081#1 | 662 | 663 |
| S. officinarum_CA085501#1 | 664 | 665 |
| S. officinarum_TA33018_4547#1 | 666 | 667 |
| S. tuberosum_TA38547_4113#1 | 668 | 669 |
| S. tuberosum_TA40790_4113#1 | 670 | 671 |
| T. aestivum_TA62358_4565#1 | 672 | 673 |
| T. officinale_TA4584_50225#1 | 674 | 675 |
| V. vinifera_GSVIVT00007223001#1 | 676 | 677 |
| Z. aethiopica_TA1464_69721#1 | 678 | 679 |
| Z. mays_TA10333_4577999#1 | 680 | 681 |
| Z. mays_TA10334_4577999#1 | 682 | 683 |
| Z. officinale_TA1360_94328#1 | 684 | 685 |
| C. japonica_TA2318_3369#1 | 686 | 687 |
| M. polymorpha_TA2032_3197#1 | 688 | 689 |
| O. lucimarinus_35895#1 | 690 | 691 |
| O. taurii_27582#1 | 692 | 693 |
| P. glauca_TA18620_3330#1 | 694 | 695 |
| P. menziesii_TA2852_3357#1 | 696 | 697 |
| P. patens_162107#1 | 698 | 699 |
| P. patens_180874#1 | 700 | 701 |
| P. patens_227546#1 | 702 | 703 |
| P. patens_56790#1 | 704 | 705 |
| P. pinaster_TA3549_71647#1 | 706 | 707 |
| P. sitchensis_TA12910_3332#1 | 708 | 709 |
| P. taeda_TA117_3352#1 | 710 | 711 |
| P. taeda_TA8879_3352#1 | 712 | 713 |
| S. moellendorffii_119068#1 | 714 | 715 |
| A. majus_TA4832_4151#1 | 716 | 717 |
| A. thaliana_AT5G35620.1#1 | 718 | 719 |
| A. trichopoda_TA1884_13333#1 | 720 | 721 |
| B. napus_TA23235_3708#1 | 722 | 723 |
| B. oleracea_TA7150_3712#1 | 724 | 725 |
| B. oleracea_TA9753_3712#1 | 726 | 727 |
| C. annuum_TA4905_4072#1 | 728 | 729 |
| C. endivia_TA3234_114280#1 | 730 | 731 |
| C. intybus_EH698519#1 | 732 | 733 |
| C. sinensis_TA15477_2711#1 | 734 | 735 |
| C. tinctorius_EL398837#1 | 736 | 737 |
| C. tinctorius_TA3701_4222#1 | 738 | 739 |
| C. tinctorius_TA3908_4222#1 | 740 | 741 |
| E. esula_TA11865_3993#1 | 742 | 743 |
| F. arundinacea_TA4879_4606#1 | 744 | 745 |
| F. vesca_TA10417_57918#1 | 746 | 747 |
| G. arboreum_BF275433#1 | 748 | 749 |
| G. hirsutum_TA25457_3635#1 | 750 | 751 |
| G. max_TA47310_3847#1 | 752 | 753 |
| G. raimondii_CO091100#1 | 754 | 755 |
| H. annuus_TA11250_4232#1 | 756 | 757 |
| H. ciliaris_EL412673#1 | 758 | 759 |
| H. exilis_TA4524_400408#1 | 760 | 761 |
| H. paradoxus_TA2272_73304#1 | 762 | 763 |
| H. petiolaris_TA3720_4234#1 | 764 | 765 |
| H. tuberosus_TA3600_4233#1 | 766 | 767 |
| H. vulgare_BF265202#1 | 768 | 769 |
| I. batatas_TA3257_4120#1 | 770 | 771 |
| J. hindsii_x_regia_TA854_432290#1 | 772 | 773 |
| L. perennis_DW100049#1 | 774 | 775 |
| L. sativa_TA3660_4236#1 | 776 | 777 |
| L. serriola_DW115219#1 | 778 | 779 |
| L. serriola_TA139_75943#1 | 780 | 781 |
| L. tulipifera_TA1346_3415#1 | 782 | 783 |
| M. truncatula_AC174281_23.4#1 | 784 | 785 |
| N. tabacum_TA16190_4097#1 | 786 | 787 |
| O. basilicum_TA868_39350#1 | 788 | 789 |
| P. deltoides_CV130917#1 | 790 | 791 |
| P. trichocarpa_scaff_VIII.1581#1 | 792 | 793 |
| P. trichocarpa_scaff_X.371#1 | 794 | 795 |
| R. communis_TA2161_3988#1 | 796 | 797 |
| S. bicolor_5277963#1 | 798 | 799 |
| S. lycopersicum_TA42439_4081#1 | 800 | 801 |
| S. miltiorrhiza_TA1369_226208#1 | 802 | 803 |
| S. officinarum_TA33209_4547#1 | 804 | 805 |
| S. tuberosum_CK245580#1 | 806 | 807 |
| T. aestivum_TA69126_4565#1 | 808 | 809 |
| T. kok-saghyz_TA1330_333970#1 | 810 | 811 |
| V. vinifera_EE097579#1 | 812 | 813 |
| Z. mays_EE041506#1 | 814 | 815 |
| Z. mays_TA12850_4577999#1 | 816 | 817 |

[0659] In some instances, related sequences have tentatively been assembled and publicly disclosed by research institutions, such as The Institute for Genomic Research (TIGR; beginning with TA). The Eukaryotic Gene Orthologs (EGO) database may be used to identify such related sequences, either by keyword search or by using the BLAST algorithm with the nucleic acid sequence or polypeptide sequence of interest. On other instances, special nucleic acid sequence databases have been created for particular organisms, such as by the Joint Genome Institute. Further, access to proprietary databases, has allowed the identification of novel nucleic acid and polypeptide sequences.

### 1.5. GR-RBP (Glycine Rich-RNA Binding Protein) Polypeptides

[0660] Table A5 provides a list of nucleic acid sequences related to the nucleic acid sequence used in the methods of the present invention.

TABLE A5
Examples of GR-RBP polypeptides:

| | Nucleic | |
|---|---|---|
| | acid | |
| | SEQ | Polypeptide |
| Name | ID NO: | SEQ ID NO: |
| O. sativa_LOC_Os12g31800.1 | 826 | 827 |
| A. thaliana_AT4G13850.2 | 841 | 938 |
| A. thaliana_AT4G13850.3 | 842 | 939 |
| A. thaliana_AT4G13850.4 | 843 | 940 |
| Arabidopsis_thaliana_AJ002892 | 844 | 941 |
| Arabidopsis_thaliana_AY097374 | 845 | 942 |
| Arabidopsis_thaliana_BT002197 | 846 | 943 |
| Arabidopsis_thaliana_BT006315 | 847 | 944 |
| B. napus_BN06MC14993_44009177@14945 | 848 | 945 |
| B. napus_BN06MC33239_51481786@33086 | 849 | 946 |
| Bambusa_oldhamii_EU076902 | 850 | 947 |
| E. lagascae_s_el01277_t@402 | 851 | 948 |
| G. max_GM06MC37402_su20g11@36531 | 852 | 949 |
| H. vulgare_c63432693hv270303@6212 | 853 | 950 |
| H. vulgare_HV04MC07973_63432693@7969 | 854 | 951 |
| Hordeum_vulgare_subsp_vulgare_AK249796 | 855 | 952 |
| Hordeum_vulgare_subsp_vulgare_AK252775 | 856 | 953 |
| L. usitatissimum_c62280695@9780 | 857 | 954 |
| Nicotiana_sylvestris_D28862 | 858 | 955 |
| Nicotiana_tabacum_AY048972 | 859 | 956 |
| O. sativa_LOC_Os07g41120.1 | 860 | 957 |
| O. sativa_LOC_Os10g17454.2 | 861 | 958 |
| Oryza_sativa_Indica_Group_CT830471 | 862 | 959 |
| P. patens_167311 | 863 | 960 |
| P. patens_208328 | 864 | 961 |
| P. trichocarpa_707174 | 865 | 962 |
| Picea_sitchensis_EF083658 | 866 | 963 |
| Picea_sitchensis_EF086676 | 867 | 964 |
| Pisum_sativum_U81287 | 868 | 965 |
| Populus_trichocarpa_EF148189 | 869 | 966 |
| S. bicolor_Sb03g043760.1 | 870 | 967 |
| S. bicolor_Sb08g015580.1 | 871 | 968 |
| Solanum_lycopersicum_BT012756 | 872 | 969 |
| T. aestivum_c54626433@14323 | 873 | 970 |
| T. aestivum_c55526991@11638 | 874 | 971 |
| T. aestivum_c56257751@11019 | 875 | 972 |
| T. aestivum_TA06MC00270_56599813@270 | 876 | 973 |
| V. vinifera_GSVIVT00016201001 | 877 | 974 |
| Z. mays_ZM07MC15190_65293483@15154 | 878 | 975 |
| Z. mays_ZM07MC16747_65163049@16705 | 879 | 976 |
| Zea_mays_DQ245645 | 880 | 977 |
| Zea_mays_DQ245844 | 881 | 978 |
| Zea_mays_EU968589 | 882 | 979 |
| Zea_mays_BT033345 | 883 | 980 |
| Mesembryanthemum_crystallinum_AB294247 | 884 | 981 |
| Nicotiana_plumbaginifolia_X65117 | 885 | 982 |
| Nicotiana_sylvestris_X53942 | 886 | 983 |
| Nicotiana_sylvestris_X61113 | 887 | 984 |
| O. sativa_LOC_Os07g43810.1 | 888 | 985 |
| Persea_americana_AJ421780 | 889 | 986 |
| Picea_sitchensis_EF084744 | 890 | 987 |
| Picea_sitchensis_EF085266 | 891 | 988 |
| Spinacia_oleracea_U34742 | 892 | 989 |
| A. aestivalis_CON_13b-CS_AdonisPetal- | 893 | 990 |
| 11A15.b1@770 | | |
| Chorispora_bungeana_FJ356060 | 894 | 991 |
| Cryptomeria_japonica_AB254811 | 895 | 992 |
| Dianthus_caryophyllus_AB276043 | 896 | 993 |
| G. max_GM06MC14574_59593118@14360 | 897 | 994 |
| G. max_GM06MC35719_sq55b10@34881 | 898 | 995 |
| Glycine_max_AF169205 | 899 | 996 |
| H. vulgare_gi_13098745 | 900 | 997 |
| H. vulgare_gi_24273475 | 901 | 998 |
| Hordeum_vulgare_subsp_vulgare_U49482 | 902 | 999 |
| Nicotiana_glutinosa_AF005359 | 903 | 1000 |
| Nicotiana_tabacum_EU569289 | 904 | 1001 |
| O. sativa_LOC_Os12g43600.1 | 905 | 1002 |
| Oryza_rufipogon_CU405585 | 906 | 1003 |
| Oryza_rufipogon_CU405925 | 907 | 1004 |
| Oryza_rufipogon_CU406510 | 908 | 1005 |
| Oryza_sativa_Indica_Group_AF009411 | 909 | 1006 |
| Oryza_sativa_Indica_Group_AJ302060 | 910 | 1007 |
| Oryza_sativa_Indica_Group_CT828032 | 911 | 1008 |
| Oryza_sativa_Indica_Group_CT828687 | 912 | 1009 |
| Oryza_sativa_Japonica_Group_AF010580 | 913 | 1010 |
| Oryza_sativa_Japonica_Group_AJ002893 | 914 | 1011 |
| Oryza_sativa_Japonica_Group_AK059164 | 915 | 1012 |
| Oryza_sativa_Japonica_Group_AK111046 | 916 | 1013 |
| Oryza_sativa_Japonica_Group_AK119238 | 917 | 1014 |
| Picea_glauca_AF109917 | 918 | 1015 |
| Picea_sitchensis_EF082522 | 919 | 1016 |
| Populus_trichocarpa_EF144619 | 920 | 1017 |
| Prunus_avium_AY050483 | 921 | 1018 |
| Ricinus_communis_AJ245939 | 922 | 1019 |
| Rumex_obtusifolius_AJ441311 | 923 | 1020 |
| S. bicolor_Sb01g012300.1 | 924 | 1021 |
| Sinapis_alba_L31374 | 925 | 1022 |
| Sinapis_alba_L31377 | 926 | 1023 |
| Solanum_commersonii_Y12424 | 927 | 1024 |
| Solanum_tuberosum_Z49197 | 928 | 1025 |
| Sorghum_bicolor_AF310215 | 929 | 1026 |
| Sorghum_bicolor_X57662 | 930 | 1027 |
| T. aestivum_c50852885@10711 | 931 | 1028 |
| T. aestivum_c54623722@14648 | 932 | 1029 |
| T. aestivum_c57139332@11252 | 933 | 1030 |
| T. aestivum_c59884010@9282 | 934 | 1031 |
| Triticum_aestivum_AB272227 | 935 | 1032 |
| Triticum_aestivum_U32310 | 936 | 1033 |
| Z. mays_ZM07MC37068_60778288@36943 | 937 | 1034 |

[0661] In some instances, related sequences have tentatively been assembled and publicly disclosed by research institutions, such as The Institute for Genomic Research (TIGR; beginning with TA). The Eukaryotic Gene Orthologs (EGO) database may be used to identify such related sequences, either by keyword search or by using the BLAST algorithm with the nucleic acid sequence or polypeptide sequence of interest. On other instances, special nucleic acid sequence databases have been created for particular organisms, such as by the Joint Genome Institute. Further, access to proprietary databases, has allowed the identification of novel nucleic acid and polypeptide sequences.

### Example 2

### Alignment of Sequences Related to the Polypeptide Sequences Used in the Methods of the Invention

### 2.1. C3H-Like Polypeptides

[0662] Alignment of polypeptide sequences was performed using the ClustalW 2.0 algorithm of progressive alignment (Thompson et al. (1997) Nucleic Acids Res 25:4876-4882; Chema et al. (2003). Nucleic Acids Res 31:3497-3500) with standard setting (slow alignment, similarity matrix: Gonnet, gap opening penalty 10, gap extension penalty: 0.2). Minor manual editing was done to further optimise the alignment.

[0663] A phylogenetic tree of C3H-like polypeptides (FIG. 2) was constructed using a neighbour-joining clustering algorithm as provided in the AlignX programme from the Vector NTI (Invitrogen).

### 2.2. SPATULA-Like (SPT) Polypeptides

[0664] Alignment of polypeptide sequences was performed using the ClustalW 2.0 algorithm of progressive alignment (Thompson et al. (1997) Nucleic Acids Res 25:4876-4882; Chema et al. (2003). Nucleic Acids Res 31:3497-3500) with standard setting (slow alignment, similarity matrix: Gonnet, gap opening penalty 10, gap extension penalty: 0.2). Minor manual editing was done to further optimise the alignment.

[0665] A phylogenetic tree of SPATULA-LIKE polypeptides (FIG. 5) was constructed using a neighbour-joining clustering algorithm as provided in the AlignX programme from the Vector NTI (Invitrogen).

### 2.3. IDI2 (Iron Deficiency Induced 2) Polypeptides

[0666] Alignment of polypeptide sequences was performed using the ClustalW 2.0 algorithm of progressive alignment (Thompson et al. (1997) Nucleic Acids Res 25:4876-4882; Chema et al. (2003). Nucleic Acids Res 31:3497-3500) with standard setting (slow alignment, similarity matrix: Gonnet, gap opening penalty 10, gap extension penalty: 0.2). Minor manual editing was done to further optimise the alignment. The IDI2 polypeptides of group A are aligned in FIG. 8. The highest degree of conservation is found in the N-terminal half of the protein sequence, the C-terminal part is variable in length. This alignment can be used for determining conserved signature sequences of about 5 to 10 amino acids in length. Preferably the conserved regions of the proteins are used, recognisable by the asterisks (identical residues), the colons (highly conserved substitutions) and the dots (conserved substitutions).

[0667] A phylogenetic tree of GR-RBP polypeptides (FIG. 9) was constructed using MAFFT (Katoh and Toh (2008) Briefings in Bioinformatics 9:286-298) for aligning the sequences. A neighbour-joining tree was calculated using QuickTree (Howe et al. (2002), Bioinformatics 18(11): 1546-7). Support of the major branching after 100 bootstrap repetitions is indicated. Visualisation of the tree was done with Dendroscope (Huson et al. (2007), BMC Bioinformatics 8(1):460). The tree shows a clear delineation of 2 subgroups (A and B) within the IDI2 polypeptides with a few outliers, SEQ ID NO: 140 clusters with the sequences within group A.

2.4. eIF4F-Like Protein Complex

[0668] Alignment of polypeptide sequences was performed using the ClustalW 2.0 algorithm of progressive alignment (Thompson et al. (1997) Nucleic Acids Res 25:4876-4882; Chema et al. (2003). Nucleic Acids Res 31:3497-3500) with standard setting (slow alignment, similarity matrix: Gonnet (or Blosum 62 (if polypeptides are aligned), gap opening penalty 10, gap extension penalty: 0.2). Minor manual editing was done to further optimise the alignment.

[0669] A phylogenetic tree of eIF4F-like protein complex subunits-polypeptides, eIF4G/isoG, eIG4A and eIF4E/iso (FIGS. 12, 13 and 14) were constructed using a neighbour-joining clustering algorithm as provided in the AlignX programme from the Vector NTI (Invitrogen).

[0670] Alignment of polypeptide sequences was performed using the ClustalW 2.0 algorithm of progressive alignment (Thompson et al. (1997) Nucleic Acids Res 25:4876-4882; Chema et al. (2003). Nucleic Acids Res 31:3497-3500) with standard setting (slow alignment, similarity matrix: Gonnet, gap opening penalty 10, gap extension penalty: 0.2). Minor manual editing was done to further optimise the alignment.

### 2.5. GR-RBP (Glycine Rich-RNA Binding Protein) Polypeptides

[0671] Alignment of polypeptide sequences was performed using VNTI (Advance 10, Invitrogen), with default settings. The alignment is created using the Clustal W algorithm (Nucleic Acid Research, 22 (22): 4673-4680, 1994). The GR-RBP polypeptides are aligned in FIG. 17. The highest degree of conservation is found in the N-terminal half of the protein sequence, the Glycine-rich domain, although variable in length, is readily recognisable.

[0672] A phylogenetic tree of GR-RBP polypeptides (FIG. 18) was constructed using MAFFT (Katoh and Toh (2008) Briefings in Bioinformatics 9:286-298) for aligning the sequences. A neighbour-joining tree was calculated using QuickTree (Howe et al. (2002), Bioinformatics 18(11): 1546-7). Support of the major branching after 100 bootstrap repetitions is indicated. Visualisation of the tree was done with Dendroscope (Huson et al. (2007), BMC Bioinformatics 8(1):460). The tree shows a clear delineation of 2 subgroups within the GR-RBP polypeptides, group A and a smaller group B. SEQ ID NO: 827 clusters with the sequences within group A.

### Example 3

### Calculation of Global Percentage Identity Between Polypeptide Sequences Useful in Performing the Methods of the Invention

### 3.1. C3H-Like Polypeptides

[0673] Global percentages of similarity and identity between full length polypeptide sequences were determined using the MatGAT (Matrix Global Alignment Tool) software (BMC Bioinformatics. 2003 4:29. MatGAT: an application that generates similarity/identity matrices using protein or DNA sequences. Campanella J J, Bitincka L, Smalley J; software hosted by Ledion Bitincka). MatGAT software generates similarity/identity matrices for DNA or protein sequences without needing pre-alignment of the data. The program performs a series of pair-wise alignments using the Myers and Miller global alignment algorithm (with a gap opening penalty of 12, and a gap extension penalty of 2), calculates similarity and identity using for example Blosum 62 (for polypeptides), and then places the results in a distance matrix. Sequence similarity is shown in the bottom half of the dividing line and sequence identity is shown in the top half of the diagonal dividing line.

[0674] Parameters used in the comparison were:
[0675] Scoring matrix: Blosum62
[0676] First Gap: 12
[0677] Extending gap: 2

[0678] Results of the software analysis are shown in Table B1 for the global similarity and identity over the full length of the polypeptide sequences. Percentage identity is given above the diagonal and percentage similarity is given below the diagonal.

TABLE B1
MatGAT results for global similarity and identity over the full length of the polypeptide sequences.

| | | 1 | 2 | 3 | 4 | 5 | 6 | 7 | 8 | 9 | 10 | 11 | 12 | 13 | 14 | 15 | 16 | 17 | 18 | 19 | 20 | 21 | 22 | 23 |
|---|---|---|---|---|---|---|---|---|---|---|---|---|---|---|---|---|---|---|---|---|---|---|---|---|
| 1. | A_cepa_TC4713 | | 41 | 39.6 | 40.4 | 41.1 | 35.9 | 32.8 | 40.6 | 43.5 | 46.4 | 45.8 | 32 | 42.9 | 43.5 | 40.4 | 42.8 | 42.4 | 43.6 | 47.7 | 47.4 | 43.8 | 47.6 | 43.4 |
| 2. | A_thaliana_AT3G46620_1 | 52.4 | | 67.8 | 64.5 | 36.9 | 31.9 | 30.2 | 38.3 | 42.3 | 45.1 | 46.2 | 28.7 | 45.3 | 39.4 | 41.4 | 44.6 | 43.7 | 45.3 | 45.4 | 43.6 | 42.6 | 39.9 | 45 |
| 3. | A_thaliana_AT5G59550_1 | 51.1 | 80.6 | | 76.3 | 36.3 | 32.1 | 27.9 | 37.3 | 41.6 | 47.8 | 45.7 | 27.7 | 45.8 | 38.4 | 40.3 | 45.1 | 44.1 | 45.8 | 45 | 45 | 42.4 | 40 | 46.1 |
| 4. | B_napus_TC85754 | 52.9 | 79 | 86.7 | | 37.3 | 32.3 | 29.3 | 36.2 | 42.5 | 48.4 | 47.2 | 27.3 | 46.1 | 40.6 | 39.7 | 45.5 | 44.1 | 45.7 | 44.3 | 44 | 42.4 | 42.9 | 46.1 |
| 5. | C_clementina_DY266223 | 59.3 | 50.4 | 49.4 | 48.9 | | 80.8 | 35 | 39.7 | 78.8 | 47.2 | 52 | 35.3 | 43.6 | 42.2 | 39.5 | 42.7 | 42.5 | 43 | 45.2 | 45.1 | 43.7 | 41.3 | 43.3 |
| 6. | C_clementina_TC3900 | 52.4 | 44.8 | 44.5 | 43 | 81.7 | | 40.1 | 35.3 | 72.2 | 40.5 | 46.1 | 42.3 | 39.3 | 39.2 | 32.3 | 37.1 | 37.1 | 37.7 | 39.8 | 39.3 | 38.1 | 36.5 | 38.8 |
| 7. | C_longa_TA1491_136217 | 49.5 | 39.7 | 37.6 | 39.2 | 48.3 | 56.6 | | 37.3 | 31.1 | 33.7 | 34.6 | 38.8 | 31.2 | 33.2 | 28.8 | 31.6 | 33.5 | 32 | 33.8 | 33.5 | 33.5 | 30.5 | 30.7 |
| 8. | C_longa_TA268_136217 | 59.3 | 57 | 55.5 | 54.7 | 55.6 | 51.4 | 48 | | 41.2 | 44.6 | 44.8 | 32.7 | 40.5 | 36.4 | 41 | 43 | 43.1 | 42.8 | 41.5 | 41 | 43.4 | 38.1 | 40.3 |
| 9. | C_sinensis_TC458 | 59.8 | 58.2 | 55.8 | 55.9 | 81.6 | 73.7 | 43.3 | 63.8 | | 54.9 | 60.9 | 31.7 | 49.2 | 42.7 | 43.3 | 49.5 | 50.6 | 50.5 | 50.6 | 49.9 | 51.8 | 48.2 | 50 |
| 10. | F_vesca_TA10341_57918 | 62.6 | 58.7 | 60 | 59.5 | 59.6 | 51.7 | 44.4 | 64 | 70.8 | | 60.1 | 34.9 | 51.5 | 44.5 | 49.5 | 60.8 | 55.8 | 62 | 57.1 | 57 | 54.3 | 52 | 51.9 |
| 11. | G_hirsutum_TC105257 | 62.3 | 59.2 | 59.2 | 59.5 | 61 | 54.2 | 45.8 | 63.7 | 72.6 | 75.3 | | 33.6 | 51 | 43.2 | 47.2 | 56.1 | 55.2 | 55.8 | 51.1 | 51.1 | 55.6 | 50.1 | 52.1 |
| 12. | G_hirsutum_TC82591 | 46.6 | 37 | 35.6 | 36.7 | 47.3 | 56.6 | 54.7 | 44.4 | 42.8 | 44.7 | 44.4 | | 30.3 | 32.7 | 55.3 | 31.6 | 32.1 | 31.5 | 34.8 | 34.8 | 33.6 | 28.9 | 30.3 |
| 13. | G_hirsutum_TC85784 | 57.7 | 61.3 | 61.7 | 63.3 | 57.1 | 50.5 | 42.9 | 62.6 | 64.2 | 68.3 | 68 | 41.8 | | 63.8 | 42.3 | 49.4 | 48.4 | 48.6 | 47.9 | 48.4 | 47.6 | 41.2 | 97 |
| 14. | G_hirsutum_TC92683 | 59.9 | 52.9 | 49.6 | 53.4 | 59 | 52.8 | 47.8 | 55.4 | 59.5 | 60.7 | 57.7 | 46.9 | 73.5 | | 37.7 | 41.5 | 40 | 41.3 | 42.9 | 43.2 | 42.2 | 37.4 | 64.6 |
| 15. | G_hirsutum_TC93828 | 53.5 | 56.2 | 56.8 | 57.5 | 51.2 | 43.7 | 38.8 | 56.6 | 57.8 | 62.2 | 63 | 56.8 | 58.1 | 53.2 | | 45.4 | 48.1 | 45.7 | 46.4 | 46.4 | 48.2 | 42 | 43.2 |
| 16. | G_max_Glyma11g14580_1 | 59 | 58 | 60 | 61.3 | 57.6 | 49.9 | 43.5 | 62.6 | 65.1 | 74.8 | 69.6 | 40.7 | 66.9 | 57.9 | 58.9 | | 52.5 | 93.4 | 61.7 | 61.9 | 51.4 | 45.2 | 49.1 |
| 17. | G_max_Glyma11g34160_1 | 56.7 | 59 | 61.2 | 59.5 | 55.5 | 48.9 | 42.5 | 60.8 | 65.6 | 68.2 | 69.7 | 41 | 62.6 | 53.7 | 64.9 | 64.9 | | 53.8 | 49.7 | 49.9 | 83.9 | 45 | 48.2 |
| 18. | G_max_Glyma12g06460_1 | 59 | 59.5 | 60.7 | 60.5 | 56.8 | 50.1 | 43.5 | 61.2 | 65.7 | 75.3 | 70.7 | 40.2 | 66.9 | 59 | 57.1 | 96.7 | 65.1 | | 62.3 | 62.2 | 52.7 | 46.3 | 48.6 |
| 19. | G_max_Glyma13g41340_1 | 65.6 | 56.7 | 55.3 | 58.2 | 62.5 | 55.1 | 47.5 | 58.8 | 63.5 | 68 | 64.2 | 47.1 | 63.7 | 63.4 | 57.8 | 72.9 | 60.1 | 72.9 | | 94.3 | 49.7 | 48.9 | 49.3 |
| 20. | G_max_Glyma15g04080_1 | 65.6 | 56.7 | 54.8 | 56.7 | 62.1 | 54.5 | 47.1 | 57.1 | 62.6 | 68 | 63.4 | 47.1 | 63.1 | 62.7 | 57.6 | 73.4 | 59.8 | 73.4 | 96.5 | | 49.9 | 48.5 | 49.2 |
| 21. | G_max_Glyma18g04140_1 | 61.6 | 55.2 | 56.8 | 57.2 | 57.6 | 50.6 | 44.9 | 63.8 | 68.9 | 70.2 | 70.7 | 43.2 | 63.4 | 58.8 | 61.2 | 65.7 | 86.5 | 66.2 | 64.7 | 63.6 | | 45.2 | 48.1 |
| 22. | G_max_Glyma18g40130_1 | 66 | 53.4 | 51.6 | 54.7 | 61.5 | 54.8 | 44.2 | 55.4 | 64 | 63.5 | 64.5 | 42 | 57.1 | 59 | 54 | 58.2 | 57.3 | 58.4 | 64 | 63.7 | 59.3 | | 41.7 |
| 23. | G_raimondii_TC6392 | 58.7 | 61.8 | 61.4 | 62.3 | 57.9 | 50.5 | 42.6 | 62 | 65 | 68.6 | 69.1 | 41.8 | 97.3 | 74.3 | 58.9 | 65.8 | 62.3 | 66.4 | 63.4 | 63.1 | 63.9 | 57.7 | |
| 24. | L_japonicus_TC26018 | 55.9 | 59.7 | 61.9 | 60.8 | 52.2 | 45.6 | 42 | 59.6 | 60.7 | 69.4 | 67.5 | 39.6 | 64.4 | 54.4 | 59.4 | 77.3 | 65.9 | 78.4 | 64.6 | 65.2 | 63.9 | 54.9 | 63.9 |
| 25. | L_sativa_TC27450 | 57.1 | 62.5 | 63.6 | 60.8 | 55.8 | 49.4 | 41.9 | 57.6 | 62 | 65.9 | 69.5 | 42.4 | 67.2 | 57.1 | 64 | 64.6 | 69.2 | 65.4 | 59.4 | 58.9 | 68.2 | 57.6 | 64.9 |
| 26. | M_esculenta_TA5606_3983 | 53.7 | 44.6 | 40.8 | 43.5 | 55.8 | 65.7 | 56.5 | 50.3 | 50.7 | 51.7 | 49.6 | 63.5 | 49.7 | 54.3 | 45.2 | 46.8 | 49.4 | 47.9 | 53.2 | 53.2 | 53.7 | 48.4 | 49.7 |
| 27. | M_truncatula_AC135467_2_5_CDS | 59.1 | 62.5 | 62.2 | 61.3 | 55 | 48.2 | 41.7 | 62.6 | 64.8 | 71.8 | 71.3 | 40.4 | 65 | 56.9 | 60.7 | 83.2 | 64.4 | 84.3 | 72.4 | 72.4 | 64 | 58.3 | 64.8 |
| 28. | M_truncatula_AC157503_6_4 | 61.4 | 59.7 | 58 | 58.5 | 57.7 | 52.1 | 41.1 | 60.8 | 66.2 | 72.8 | 67.8 | 43.7 | 66.9 | 60 | 60.4 | 78.4 | 62.8 | 78.7 | 73.8 | 73.8 | 66.2 | 60.3 | 66.7 |
| 29. | N_benthamiana_TC11136 | 60.6 | 49.9 | 49.6 | 49.9 | 61.5 | 65.5 | 50.9 | 54.5 | 56.9 | 57.3 | 55 | 55.9 | 56.6 | 61.2 | 49.9 | 59.6 | 53.2 | 59 | 65 | 64.3 | 56.2 | 57.1 | 56.3 |
| 30. | N_benthamiana_TC12970 | 56.4 | 60.3 | 62.9 | 60.8 | 55.1 | 48 | 39.7 | 59.3 | 64.5 | 69.5 | 66.8 | 39.9 | 64.8 | 57.2 | 60.7 | 70.5 | 68.4 | 70 | 64 | 64.2 | 65.5 | 56.4 | 64.2 |
| 31. | N_tabacum_TC16005 | 62.8 | 59 | 59.2 | 59.2 | 60.8 | 53 | 43.2 | 61.9 | 66.9 | 69.9 | 65.9 | 44.1 | 64.8 | 62 | 60.2 | 69.5 | 64.4 | 70.1 | 67.7 | 65.4 | 68.9 | 61.7 | 65.8 |
| 32. | O_sativa_LOC_Os05g01940_1 | 59.3 | 61.8 | 59.5 | 59.5 | 54.9 | 47.9 | 44 | 61.9 | 62.7 | 67.9 | 66.3 | 39.1 | 63.2 | 55.4 | 63 | 65.3 | 66.2 | 65.3 | 59.8 | 59.1 | 64.5 | 60.6 | 63.2 |
| 33. | P_trichocarpa_560785 | 67.2 | 54.9 | 51.8 | 52.4 | 63.4 | 57.9 | 46.3 | 59.6 | 67.7 | 66.3 | 69.6 | 49.8 | 60.1 | 62.7 | 57.8 | 63.4 | 63.4 | 63.4 | 68.8 | 69.1 | 66.4 | 70.5 | 60.1 |
| 34. | P_trichocarpa_765468 | 46 | 51.3 | 55.3 | 53 | 46.2 | 39.7 | 34.2 | 51.1 | 53.2 | 55.5 | 55.5 | 34.6 | 52.1 | 46.6 | 55.7 | 54.9 | 60.8 | 56.3 | 49.4 | 48.5 | 56.3 | 47.7 | 52.3 |
| 35. | P_trifoliata_TA5973_37690 | 55.9 | 60 | 58 | 58 | 75.7 | 68.4 | 41.4 | 61.2 | 93.3 | 68.2 | 72.5 | 39.8 | 65 | 55.6 | 58.6 | 62.8 | 65.4 | 64.2 | 59.6 | 59.4 | 65.5 | 61.5 | 66.3 |
| 36. | R_communis_EE259446 | 63.2 | 46.8 | 46.9 | 47.3 | 61.8 | 67 | 55.9 | 57.1 | 59.8 | 59.8 | 61.8 | 56.7 | 56 | 59 | 49.6 | 56.8 | 54.5 | 56 | 59.6 | 59.9 | 57.6 | 59 | 56 |
| 37. | R_communis_TA1159_3988 | 52.6 | 64 | 66.7 | 65.5 | 51.8 | 44.3 | 40.1 | 59.9 | 60.3 | 68.1 | 64.2 | 38.9 | 64.7 | 55 | 59.9 | 64.2 | 63.3 | 64.7 | 58.2 | 58.2 | 61.6 | 54.7 | 65.2 |
| 38. | R_communis_TA1782_3988 | 54.9 | 58.7 | 59.7 | 62 | 54.1 | 46.4 | 38.9 | 58 | 61.1 | 62.9 | 64.2 | 38.7 | 58.8 | 51.8 | 62 | 63.4 | 67.9 | 63.1 | 57.7 | 57.5 | 64.7 | 56.7 | 59.5 |
| 39. | R_communis_TA1803_3988 | 61.8 | 55.2 | 57.2 | 58.5 | 58.7 | 51.1 | 44.4 | 64.6 | 71.1 | 73.6 | 76.7 | 43 | 66.4 | 58.7 | 59.4 | 70.4 | 65.6 | 70.4 | 64 | 64.6 | 69.7 | 63.2 | 66.7 |
| 40. | S_bicolor_Sb09g001100_1 | 54.7 | 57.1 | 56.9 | 55.7 | 49.9 | 43.1 | 37.5 | 55.9 | 57.9 | 62.7 | 61.5 | 35.1 | 61.3 | 52.1 | 56.4 | 59.8 | 61.3 | 59.6 | 54.2 | 54.2 | 57.4 | 54 | 60 |
| 41. | S_tuberosum_TC193013 | 52.1 | 42 | 43.5 | 42.8 | 54.9 | 64.5 | 61.6 | 48 | 49.3 | 51.7 | 48.5 | 65.4 | 49.5 | 53.4 | 42.9 | 51.2 | 45.5 | 51.2 | 55.4 | 54.5 | 48.3 | 48.7 | 49.7 |
| 42. | V_vinifera_GSVIVT00021348001 | 60.1 | 57.5 | 59.5 | 61.3 | 63.2 | 55.1 | 44.6 | 64.5 | 74 | 72.6 | 76.4 | 44 | 67.5 | 60.1 | 61.7 | 70.9 | 68.7 | 70.4 | 63.7 | 62 | 70.4 | 64.3 | 67.5 |
| 43. | Z_mays_TC391585 | 60.9 | 56.2 | 57 | 56.2 | 52.6 | 46.6 | 41.7 | 60.5 | 61.8 | 69.4 | 64.2 | 37.7 | 60.1 | 54.9 | 56.8 | 64.5 | 59 | 63.2 | 60.9 | 62.3 | 64.1 | 60.3 | 60.9 |
| 44. | Z_mays_ZM07MC00480_BFb0175C11 | 61.1 | 56.2 | 57 | 56.7 | 52.9 | 46.9 | 41.7 | 60.5 | 62.3 | 69.9 | 64.5 | 38 | 60.4 | 54.9 | 57.1 | 64.8 | 59.3 | 63.4 | 60.9 | 62.3 | 64.4 | 61.1 | 61.2 |
| 45. | Z_mays_ZM07MC34672_BFb0353B17 | 57 | 59.5 | 58.2 | 58 | 51.2 | 44.6 | 40.6 | 58 | 57.8 | 66.5 | 64.9 | 37.2 | 62.3 | 54.4 | 57.1 | 63.1 | 60.8 | 64.1 | 59.6 | 59.6 | 60.4 | 59.4 | 62.8 |
| 46. | Z_officinale_TA1620_94328 | 59.7 | 59.2 | 58 | 58 | 57.3 | 50.7 | 47.1 | 67.1 | 67.1 | 68.8 | 67.2 | 41.9 | 66.9 | 57.8 | 60.4 | 68.5 | 65.1 | 66.3 | 60.8 | 61.9 | 67.7 | 60.8 | 66.9 |
| | | 24 | 25 | 26 | 27 | 28 | 29 | 30 | 31 | 32 | 33 | 34 | 35 | 36 | 37 | 38 | 39 | 40 | 41 | 42 | 43 | 44 | 45 | 46 |
| 1. | A_cepa_TC4713 | 42.4 | 41.3 | 36 | 43 | 42.6 | 42.9 | 42.5 | 46.7 | 44.4 | 46.6 | 34.2 | 40.4 | 45.5 | 38.6 | 41.4 | 44.8 | 41.8 | 36.4 | 43.8 | 45.5 | 45.5 | 42.7 | 44.5 |
| 2. | A_thaliana_AT3G46620_1 | 45 | 43.4 | 34.9 | 47 | 45.8 | 38.1 | 44.3 | 45.6 | 42.5 | 42.6 | 38.3 | 42.6 | 38.1 | 46.5 | 42.5 | 43.6 | 41.4 | 33.3 | 44.6 | 41.7 | 41.7 | 42.1 | 43 |
| 3. | A_thaliana_AT5G59550_1 | 48.2 | 44.8 | 31.7 | 46.6 | 44.7 | 39.4 | 48 | 45.8 | 42.9 | 40.7 | 42.2 | 42.7 | 36.9 | 48.5 | 42.6 | 43.3 | 40.7 | 32.8 | 44.4 | 41.6 | 41.6 | 41.7 | 41.6 |
| 4. | B_napus_TC85754 | 47.9 | 42.7 | 33.5 | 46.9 | 44.3 | 39.1 | 46.5 | 45.6 | 43.2 | 40.9 | 41.1 | 42.4 | 38.5 | 48.7 | 45.3 | 44.8 | 40.3 | 33.9 | 44.7 | 39.4 | 40 | 41.3 | 42.4 |
| 5. | C_clementina_DY266223 | 41.2 | 41.9 | 44.8 | 43.4 | 43.6 | 50.2 | 44.9 | 48.2 | 43.5 | 48.7 | 35.9 | 73.5 | 50.6 | 40.4 | 42.1 | 45.4 | 40.1 | 45.2 | 50.7 | 37.9 | 37.9 | 38.4 | 46.3 |
| 6. | C_clementina_TC3900 | 35.6 | 36.4 | 52.6 | 37.1 | 39 | 51 | 38.1 | 41.2 | 37.8 | 43.4 | 30.4 | 67.4 | 50 | 34.9 | 36 | 39.2 | 33.8 | 52.4 | 43.6 | 32.4 | 32.4 | 32.4 | 40.4 |
| 7. | C_longa_TA1491_136217 | 30.1 | 31.7 | 43 | 30.7 | 30.4 | 38.6 | 31.1 | 33.5 | 35.4 | 31.7 | 26.5 | 29.9 | 41 | 29.8 | 31.1 | 33.3 | 30.8 | 45.1 | 33.3 | 32.5 | 32.5 | 32.4 | 41 |
| 8. | C_longa_TA268_136217 | 41.1 | 40.3 | 35.5 | 42.9 | 41.2 | 40.6 | 42.4 | 44 | 46.2 | 44.3 | 36 | 40.5 | 43 | 41.2 | 40.6 | 44.3 | 41.4 | 36.2 | 45.5 | 42.3 | 42.8 | 41.9 | 53.4 |
| 9. | C_sinensis_TC458 | 47.8 | 47 | 40.9 | 49.5 | 49.6 | 45.7 | 51.3 | 53.3 | 49.2 | 56.2 | 41.5 | 92.5 | 49.4 | 48.2 | 45.1 | 55.5 | 46.3 | 40.9 | 58.5 | 43.6 | 43.8 | 43.8 | 51.8 |
| 10. | F_vesca_TA10341_57918 | 56.1 | 50.4 | 40.4 | 60.1 | 56.6 | 46.1 | 57.1 | 56.3 | 57.1 | 55.1 | 45.7 | 53.1 | 50.3 | 55.1 | 50.4 | 58.7 | 53.8 | 41.8 | 59.3 | 55.6 | 56.1 | 52.1 | 51.6 |
| 11. | G_hirsutum_TC105257 | 53.6 | 55 | 41 | 57.1 | 51.9 | 46 | 54.8 | 54.4 | 52.3 | 60.9 | 44.6 | 59.6 | 53.3 | 54.6 | 50.4 | 63.8 | 49.5 | 41.6 | 63.7 | 47.8 | 48 | 48.4 | 52 |
| 12. | G_hirsutum_TC82591 | 30.5 | 31.5 | 50.8 | 31.1 | 33.6 | 43.2 | 30.9 | 34.1 | 28.3 | 33.9 | 26.4 | 29.7 | 42.4 | 31 | 29.8 | 32.7 | 26.2 | 49.2 | 33.1 | 27.2 | 27.5 | 27.6 | 31.9 |
| 13. | G_hirsutum_TC85784 | 46.1 | 48.9 | 38.9 | 48.2 | 47.5 | 43.5 | 49.9 | 50.3 | 45.5 | 43.2 | 40.2 | 48.6 | 42.9 | 50.5 | 42.9 | 48.5 | 44.2 | 40.4 | 51.3 | 43 | 43.2 | 44 | 46.9 |
| 14. | G_hirsutum_TC92683 | 38.7 | 41.9 | 40.9 | 41.6 | 42.1 | 44.1 | 42.2 | 44.1 | 40.2 | 43.6 | 34.8 | 40.4 | 43.1 | 41.2 | 37.3 | 41.2 | 37.3 | 39.1 | 43.4 | 37.2 | 37.2 | 37.6 | 42.9 |
| 15. | G_hirsutum_TC93828 | 45.4 | 45.4 | 35.4 | 46.8 | 46.3 | 39.1 | 44.5 | 46.4 | 45.2 | 43.7 | 40.5 | 42.5 | 39.2 | 44.9 | 45 | 44.3 | 42.1 | 32.7 | 46.2 | 42 | 42 | 41.2 | 44.7 |
| 16. | G_max_Glyma11g14580_1 | 67.7 | 48.4 | 37.1 | 75.1 | 63.5 | 48 | 57.1 | 56.1 | 53.1 | 50.8 | 43.7 | 48.4 | 45.4 | 50.8 | 47.9 | 54.5 | 48.4 | 42 | 54 | 48.6 | 48.8 | 47.9 | 51.8 |
| 17. | G_max_Glyma11g34160_1 | 50.2 | 54.8 | 39.2 | 51.2 | 48.1 | 41.7 | 52.8 | 51.6 | 51.9 | 50.8 | 49 | 49 | 46.3 | 51.2 | 52.4 | 53.9 | 47.8 | 36.7 | 54.3 | 46.6 | 46.8 | 45.4 | 51.8 |
| 18. | G_max_Glyma12g06460_1 | 68.4 | 48.6 | 37.2 | 75.8 | 62.9 | 46.9 | 56.8 | 55.9 | 52.8 | 50.8 | 44.5 | 49.5 | 44.8 | 51.1 | 48 | 54.5 | 49.4 | 40.7 | 55 | 47.9 | 48.2 | 49 | 50.3 |
| 19. | G_max_Glyma13g41340_1 | 55.4 | 44.7 | 40.1 | 60.6 | 63.7 | 49.7 | 54.1 | 55.6 | 48.3 | 52.3 | 40.5 | 47.7 | 45.5 | 47.4 | 47.6 | 50.7 | 44.1 | 42.7 | 48.8 | 47.1 | 47.1 | 47 | 48.4 |
| 20. | G_max_Glyma15g04080_1 | 55.8 | 45.1 | 40.6 | 61.4 | 64.7 | 49.7 | 54.5 | 54.4 | 48.3 | 52.1 | 39.7 | 47.6 | 46.1 | 46.7 | 47.3 | 52 | 43.8 | 42.7 | 48.3 | 47.9 | 47.9 | 48.3 | 49.2 |
| 21. | G_max_Glyma18g04140_1 | 48.4 | 54.6 | 40.9 | 50.3 | 48.6 | 42.5 | 50.9 | 52.9 | 51.6 | 51.5 | 44.9 | 50.4 | 47.4 | 49.6 | 50.2 | 53.8 | 46.2 | 38 | 54.9 | 48.8 | 49.1 | 46 | 52 |
| 22. | G_max_Glyma18g40130_1 | 43.6 | 44.6 | 34 | 46.1 | 46.9 | 40 | 43.8 | 48.2 | 47.5 | 55.8 | 37.6 | 45.6 | 46.3 | 42.3 | 43.3 | 51.1 | 43.5 | 33.8 | 50.5 | 46 | 46.6 | 43.7 | 46 |
| 23. | G_raimondii_TC6392 | 46.2 | 48.3 | 38.9 | 48.7 | 47.6 | 43.5 | 49.6 | 50.4 | 45.9 | 43.2 | 40.8 | 48 | 42.9 | 50.7 | 43.3 | 49.2 | 44.1 | 40.4 | 51 | 42.9 | 43.1 | 44.2 | 47.5 |
| 24. | L_japonicus_TC26018 | | 46.6 | 36.9 | 70.6 | 60.6 | 42.5 | 51.6 | 49.9 | 49.5 | 45.7 | 43.3 | 48.6 | 42.2 | 48.6 | 46.2 | 48.9 | 45 | 37.2 | 51.5 | 46.1 | 45.8 | 45.1 | 47.7 |
| 25. | L_sativa_TC27450 | 63.3 | | 38.8 | 49.5 | 44.9 | 40.8 | 50.7 | 49 | 47.7 | 46.2 | 43.7 | 47.9 | 43.8 | 48.2 | 49.8 | 51.2 | 43.9 | 35.8 | 50.6 | 44.4 | 44.7 | 43.3 | 45.3 |
| 26. | M_esculenta_TA5606_3983 | 47 | 50.1 | | 37.2 | 37.3 | 49.2 | 38 | 40.3 | 36.4 | 38.7 | 35.5 | 37.6 | 46.2 | 36.2 | 45.5 | 36.6 | 31.3 | 56.8 | 40.2 | 31.8 | 31.8 | 31.4 | 41.1 |
| 27. | M_truncatula_AC135467_2_5_CDS | 80.5 | 65.9 | 47.7 | | 63.3 | 45.8 | 53.9 | 53.9 | 51.3 | 51.8 | 46.1 | 49.9 | 45.1 | 51.6 | 47.3 | 53.4 | 46.3 | 38.5 | 53.8 | 47 | 47 | 46.9 | 49.9 |
| 28. | M_truncatula_AC157503_6_4 | 74.4 | 62.3 | 49.3 | 78.3 | | 45.6 | 52.4 | 53 | 48.9 | 49.7 | 42.2 | 47.4 | 44 | 46.9 | 43.9 | 49.1 | 43.9 | 39 | 51.7 | 43 | 43 | 43.1 | 47.4 |
| 29. | N_benthamiana_TC11136 | 54.9 | 53.2 | 61.9 | 58.5 | 58.9 | | 67.9 | 74.1 | 41.6 | 45.3 | 35.8 | 42.5 | 53.2 | 43.1 | 40.2 | 42.9 | 37.4 | 69.2 | 45.9 | 40.7 | 40.7 | 39.6 | 45.6 |
| 30. | N_benthamiana_TC12970 | 65.8 | 66.9 | 46.2 | 70.5 | 66.3 | 70.8 | | 88 | 52.2 | 49.4 | 46.2 | 50.5 | 45.5 | 54.3 | 48.7 | 53 | 45.4 | 52.1 | 53.3 | 48 | 48 | 47 | 50.1 |
| 31. | N_tabacum_TC16005 | 63.3 | 62.8 | 50.1 | 69.6 | 68.2 | 76.4 | 88.3 | | 52 | 53.5 | 44.7 | 52 | 49.3 | 52.1 | 47.7 | 53.5 | 46.4 | 57.4 | 55.1 | 49.2 | 49.2 | 48.1 | 53.3 |
| 32. | O_sativa_LOC_Os05g01940_1 | 64 | 62.8 | 45.3 | 64.2 | 63.5 | 51.6 | 67.1 | 63.5 | | 49.9 | 42.8 | 49 | 43.8 | 47.8 | 45.1 | 50.9 | 70.1 | 36.2 | 51 | 70.1 | 70.6 | 66.6 | 52.6 |
| 33. | P_trichocarpa_560785 | 57.5 | 59.4 | 53.4 | 63.7 | 62.5 | 60.8 | 61.4 | 67.7 | 60.4 | | 41.5 | 53.8 | 61.4 | 46.5 | 43.9 | 65.4 | 45.8 | 38.3 | 56.5 | 45.7 | 46.3 | 45.5 | 54.5 |
| 34. | P_trichocarpa_765468 | 56.1 | 57.6 | 42.6 | 58.4 | 54.6 | 43.2 | 55.3 | 53.4 | 54.6 | 50.2 | | 42.5 | 37.2 | 44 | 50 | 43.6 | 41.7 | 29.8 | 45.3 | 39.1 | 39.3 | 38.8 | 43.4 |
| 35. | P_trifoliata_TA5973_37690 | 63.1 | 64.6 | 47.9 | 64.4 | 63.4 | 53.2 | 66.1 | 66.3 | 64.2 | 63.9 | 55.5 | | 46.6 | 47.3 | 45.4 | 55.3 | 45.8 | 38 | 57.4 | 42.7 | 42.9 | 43.2 | 49.1 |
| 36. | R_communis_EE259446 | 53.6 | 53.7 | 63 | 54.2 | 57.2 | 65.8 | 53.8 | 58.5 | 53.6 | 70.7 | 44.5 | 56.1 | | 43.8 | 41.4 | 75.6 | 42.2 | 49.1 | 53 | 43.6 | 43.8 | 42.6 | 47.5 |
| 37. | R_communis_TA1159_3988 | 65.5 | 65.7 | 44.8 | 65.2 | 62.3 | 51.3 | 65.7 | 61.8 | 60.6 | 58.4 | 58.9 | 60.6 | 55.2 | | 47.8 | 51.2 | 46.3 | 38.2 | 51.7 | 45.3 | 45.3 | 45 | 48.8 |
| 38. | R_communis_TA1782_3988 | 63.7 | 68.8 | 54.1 | 62.9 | 60.6 | 50 | 63.1 | 61.6 | 61.1 | 57.7 | 60.1 | 62.6 | 51.5 | 64.2 | | 49.5 | 43.6 | 36 | 47.4 | 44 | 44.2 | 41.7 | 46.2 |
| 39. | R_communis_TA1803_3988 | 64.9 | 64.9 | 48.3 | 67.2 | 67.7 | 53.7 | 65.5 | 66.6 | 64.2 | 73.3 | 54.2 | 68.4 | 75.6 | 66.7 | 63.7 | | 47.3 | 38 | 60.2 | 48.3 | 48.8 | 48.5 | 52 |
| 40. | S_bicolor_Sb09g001100_1 | 59.6 | 58.6 | 39.5 | 58.1 | 59.1 | 46.2 | 60 | 57.4 | 78.5 | 56.2 | 53.8 | 58.1 | 51.3 | 63.2 | 56.2 | 60.5 | | 32.7 | 47.6 | 70.9 | 71.4 | 72.5 | 49.8 |
| 41. | S_tuberosum_TC193013 | 48 | 46.5 | 68.2 | 49.6 | 49.9 | 76.5 | 56.7 | 62.5 | 45.9 | 51.8 | 37.3 | 46.8 | 62.6 | 45.5 | 44.8 | 47.5 | 41.4 | | 40.3 | 34.8 | 34.8 | 33.7 | 39.2 |
| 42. | V_vinifera_GSVIVT00021348001 | 65.2 | 66.9 | 49.6 | 68.3 | 69 | 58.4 | 68.4 | 70.1 | 64.5 | 67 | 57.6 | 72.5 | 60.9 | 65.2 | 62.1 | 73.7 | 60 | 50.7 | | 46.8 | 47 | 47.1 | 53.5 |
| 43. | Z_mays_TC391585 | 62 | 59.4 | 44.6 | 62.9 | 62 | 53.7 | 63.7 | 66.6 | 77.7 | 60.3 | 48.7 | 58.8 | 54.9 | 58.4 | 58.8 | 63.8 | 76.3 | 46.6 | 62 | | 99.4 | 76 | 48.4 |
| 44. | Z_mays_ZM07MC00480_BFb0175C11 | 62 | 59.9 | 44.6 | 62.9 | 62 | 53.7 | 63.7 | 66.6 | 78.2 | 60.9 | 49.2 | 59.4 | 55.1 | 58.4 | 59 | 64.3 | 76.8 | 46.6 | 62.3 | 99.4 | | 76.3 | 48.6 |
| 45. | Z_mays_ZM07MC34672_BFb0353B17 | 63.9 | 60.7 | 42.2 | 62 | 60.9 | 51.2 | 64.8 | 63.1 | 78.5 | 59.6 | 49.4 | 58.6 | 52.2 | 60.3 | 57.7 | 61.7 | 80.1 | 44.9 | 62.5 | 82.1 | 82.3 | | 49 |
| 46. | Z_officinale_TA1620_94328 | 63.3 | 63 | 51.5 | 66.7 | 64.7 | 57 | 65 | 67.1 | 65.5 | 67.7 | 54.9 | 65 | 57.8 | 62.3 | 63.4 | 68.2 | 62.2 | 47.7 | 69.3 | 63 | 63.3 | 64.6 | |

[0679] A MATGAT table for local alignment of a specific domain, or data on % identity/similarity between specific domains may also be performed.

### 3.2. SPATULA-Like (SPT) Polypeptides

[0680] Global percentages of similarity and identity between full length polypeptide sequences useful in performing the methods of the invention were determined using MatGAT (Matrix Global Alignment Tool) software (BMC Bioinformatics. 2003 4:29. MatGAT: an application that generates similarity/identity matrices using protein or DNA sequences. Campanella J J, Bitincka L, Smalley J; software hosted by Ledion Bitincka). MatGAT software generates similarity/identity matrices for DNA or protein sequences without needing pre-alignment of the data. The program performs a series of pair-wise alignments using the Myers and Miller global alignment algorithm (with a gap opening penalty of 12, and a gap extension penalty of 2), calculates similarity and identity using for example Blosum 62 (for polypeptides), and then places the results in a distance matrix. Sequence similarity is shown in the bottom half of the dividing line and sequence identity is shown in the top half of the diagonal dividing line.

[0681] Parameters used in the comparison were:
[0682] Scoring matrix: Blosum62
[0683] First Gap: 12
[0684] Extending gap: 2

[0685] Results of the software analysis are shown in Table B2 for the global similarity and identity over the full length of the polypeptide sequences. Percentage identity is given above the diagonal and percentage similarity is given below the diagonal.

TABLE B2
MatGAT results for global similarity and identity over the full length of the polypeptide sequences.

| | | 1 | 2 | 3 | 4 | 5 | 6 | 7 | 8 | 9 | 10 |
|---|---|---|---|---|---|---|---|---|---|---|---|
| 1. | Poptr_SPT | | 34 | 35.2 | 53.4 | 54.6 | 37.4 | 38.6 | 38 | 46.8 | 38.5 |
| 2. | Arath_SPT | 49.1 | | 61.5 | 35.3 | 33.8 | 37.6 | 42.1 | 37.7 | 39.4 | 33.5 |
| 3. | Brana_SPT | 52.9 | 67.8 | | 32.7 | 30.8 | 32.5 | 43.8 | 34.9 | 38.1 | 32.1 |
| 4. | Carpa_SPT | 66.7 | 53.4 | 49.1 | | 50.6 | 39.4 | 37.2 | 36.3 | 44.3 | 34.6 |
| 5. | Cicle_SPT | 68.4 | 50.1 | 51.6 | 63.7 | | 38.6 | 37.7 | 37.9 | 48.1 | 40.3 |
| 6. | Escca_SPT | 51.5 | 51.3 | 42.7 | 53.6 | 50.8 | | 36.5 | 40.9 | 40.3 | 39 |
| 7. | Fra\x\ana_SPT | 55.8 | 52.8 | 60.4 | 51.2 | 56.3 | 47.1 | | 39 | 44.7 | 41.1 |
| 8. | Glyma_SPT | 50.7 | 55.4 | 47.5 | 51.7 | 50.7 | 52.7 | 52 | | 43.1 | 57.6 |
| 9. | Goshi_SPT | 63.5 | 53.1 | 59.3 | 57.9 | 62.8 | 48.3 | 60.7 | 51.4 | | 45.6 |
| 10. | Medtr_SPT | 53.8 | 52.8 | 48.3 | 50.6 | 56.1 | 51 | 54.9 | 69.2 | 56.4 | |
| 11. | Nicta_SPT | 50.3 | 46.9 | 57 | 48 | 51.6 | 41.1 | 58.7 | 42.8 | 50.2 | 47.7 |
| 12. | Solly_SPT | 52.1 | 55 | 47.4 | 52.6 | 51.3 | 56.1 | 48.4 | 56.9 | 51.1 | 57.1 |
| 13. | Vinvi_SPT | 61.3 | 52.8 | 60.3 | 56.1 | 63.8 | 49.9 | 64.1 | 52.7 | 70 | 57 |
| 14. | Glyma_SPT\like\1 | 50.7 | 56.7 | 48.8 | 52.2 | 50.1 | 53.4 | 51.4 | 96.6 | 50.9 | 70.1 |
| 15. | Glyma_SPT\like\2 | 53.5 | 51.5 | 61.6 | 48.5 | 53.9 | 44.5 | 60.1 | 66.3 | 54.5 | 57.3 |
| 16. | Solly_SPT\like\1 | 62.4 | 49.1 | 50 | 60.5 | 61.5 | 50.6 | 50.6 | 50.9 | 58.6 | 52.3 |
| 17. | Solly_SPT\like\2 | 43.2 | 41.8 | 53.2 | 42.1 | 43.4 | 36.7 | 49.3 | 39.9 | 45.5 | 41.9 |
| 18. | Orysa_SPT\like | 49.7 | 42.4 | 39.4 | 43.9 | 47.2 | 39.7 | 44.1 | 44.1 | 46.9 | 49.4 |
| 19. | Arath_ALC | 44.8 | 38.3 | 47.5 | 41.2 | 42.8 | 34.3 | 47.3 | 37.3 | 46.1 | 41.6 |

| | | 11 | 12 | 13 | 14 | 15 | 16 | 17 | 18 | 19 |
|---|---|---|---|---|---|---|---|---|---|---|
| 1. | Poptr_SPT | 36.3 | 38.1 | 46.2 | 39.3 | 38.1 | 43.4 | 32.5 | 30.7 | 33.2 |
| 2. | Arath_SPT | 35.7 | 35 | 41 | 37.5 | 40.8 | 32.5 | 31.1 | 27.2 | 30.6 |
| 3. | Brana_SPT | 42.5 | 31.9 | 41.9 | 35.8 | 45 | 32.5 | 40 | 23.4 | 36.6 |
| 4. | Carpa_SPT | 35.3 | 35.7 | 44.1 | 35.8 | 34.8 | 43.4 | 32.5 | 29.2 | 30.4 |
| 5. | Cicle_SPT | 36 | 36.5 | 45.7 | 36.8 | 37.2 | 43.9 | 29.8 | 29 | 33.4 |
| 6. | Escca_SPT | 31.4 | 39.2 | 40 | 41 | 34.8 | 35.1 | 29.3 | 27.5 | 26 |
| 7. | Fra\x\ana_SPT | 43.4 | 35.4 | 50.5 | 40.1 | 44.2 | 35 | 36.9 | 26.6 | 36 |
| 8. | Glyma_SPT | 31.3 | 37.9 | 42 | 95.1 | 62.1 | 36.3 | 29.3 | 31 | 30.1 |
| 9. | Goshi_SPT | 37.1 | 37.9 | 55 | 42.1 | 40 | 40.9 | 33.6 | 28.8 | 34 |
| 10. | Medtr_SPT | 33.7 | 39.2 | 44.7 | 59.2 | 43.2 | 33.9 | 30.2 | 32.9 | 30.5 |
| 11. | Nicta_SPT | | 49 | 45.3 | 31.8 | 41.3 | 34 | 65.8 | 24.9 | 38 |
| 12. | Solly_SPT | 55.3 | | 36.4 | 38.2 | 34.8 | 34.5 | 57.1 | 29.4 | 29.1 |
| 13. | Vinvi_SPT | 58 | 51.3 | | 41.3 | 43.8 | 39.2 | 38.6 | 28.6 | 39.3 |
| 14. | Glyma_SPT\like\1 | 43.8 | 55.6 | 51.4 | | 58.3 | 37.1 | 29.3 | 30.9 | 29.5 |
| 15. | Glyma_SPT\like\2 | 57 | 49.2 | 58.3 | 63.8 | | 35 | 40.6 | 26.8 | 38.7 |
| 16. | Solly_SPT\like\1 | 45.5 | 48.9 | 58.3 | 52 | 54.1 | | 30.4 | 29.8 | 30.1 |
| 17. | Solly_SPT\like\2 | 75.6 | 57.1 | 51.5 | 38.6 | 55.2 | 42.4 | | 21.2 | 35.1 |
| 18. | Orysa_SPT\like | 38.4 | 43.4 | 45.6 | 44.4 | 43.1 | 48.1 | 32.2 | | 23.7 |
| 19. | Arath_ALC | 53.7 | 36.8 | 48.1 | 36.7 | 48.4 | 39.8 | 53 | 35.9 | |

[0686] A MATGAT table for local alignment of a specific domain, or data on % identity/similarity between specific domains may also be performed.

### 3.3. IDI2 (Iron Deficiency Induced 2) Polypeptides

[0687] Global percentages of similarity and identity between full length polypeptide sequences useful in performing the methods of the invention were determined using one of the methods available in the art, the MatGAT (Matrix Global Alignment Tool) software (BMC Bioinformatics. 2003 4:29. MatGAT: an application that generates similarity/identity matrices using protein or DNA sequences. Campanella J J, Bitincka L, Smalley J; software hosted by Ledion Bitincka). MatGAT software generates similarity/identity matrices for DNA or protein sequences without needing pre-alignment of the data. The program performs a series of pair-wise alignments using the Myers and Miller global alignment algorithm (with a gap opening penalty of 12, and a gap extension penalty of 2), calculates similarity and identity using for example Blosum 62 (for polypeptides), and then places the results in a distance matrix. Sequence similarity is shown in the bottom half of the dividing line and sequence identity is shown in the top half of the diagonal dividing line.

[0688] Parameters used in the comparison were:
[0689] Scoring matrix: Blosum62
[0690] First Gap: 12
[0691] Extending gap: 2

[0692] Results of the software analysis are shown in Table B3 for the global similarity and identity over the full length of the polypeptide sequences.

[0693] The percentage identity between the IDI2 polypeptide sequences useful in performing the methods of the invention can be as low as 24% amino acid identity compared to SEQ ID NO: 140.

TABLE B3
MatGAT results for global similarity and identity over the full length of the polypeptide sequences.

| | | 1 | 2 | 3 | 4 | 5 | 6 | 7 | 8 | 9 | 10 | 11 | 12 | 13 |
|---|---|---|---|---|---|---|---|---|---|---|---|---|---|---|
| 1. | Saccof_IDI2 | | 25.3 | 88 | 26.1 | 84.8 | 40.1 | 35.6 | 33.7 | 84.8 | 53.3 | 68 | 24.1 | 96.7 |
| 2. | Chlorella_140697 | 33.5 | | 25.3 | 50.9 | 24.9 | 20.2 | 9.6 | 9.2 | 24.7 | 26.4 | 24.7 | 41.1 | 25.3 |
| 3. | H. vulgare_TA31842_4513 | 93.5 | 33.3 | | 26.3 | 84.5 | 40.1 | 34.5 | 32.3 | 84.5 | 53.3 | 66.1 | 23 | 87.5 |
| 4. | O. RCC809_50296 | 34.1 | 68.1 | 34 | | 25.7 | 19.3 | 10 | 9.5 | 25.6 | 37.1 | 24.8 | 42.9 | 26.2 |
| 5. | O. sativa.indica_BGIOSIBCE033922 | 91.2 | 33.5 | 92 | 34 | | 39.2 | 41.4 | 39.3 | 99.7 | 52.3 | 66.1 | 23.1 | 85.3 |
| 6. | O. sativa.indica_BGIOSIBSE037940 | 56.7 | 26 | 55.6 | 26.2 | 53.7 | | 16.5 | 14.2 | 39.1 | 42.1 | 40.8 | 18.4 | 39.1 |
| 7. | O. sativa_CR292756 | 38.1 | 13.3 | 39 | 13.6 | 41.4 | 23.7 | | 92.4 | 41.2 | 19.7 | 25.3 | 8.1 | 35.9 |
| 8. | O. sativa_CX116019 | 37.1 | 12.8 | 37.1 | 13.4 | 40.1 | 21.9 | 93.7 | | 39 | 19.5 | 23.4 | 8 | 33.7 |
| 9. | O. sativa_Os11g0216900 | 90.9 | 33.4 | 91.7 | 33.9 | 99.7 | 54 | 41.2 | 39.8 | | 52.1 | 66.1 | 23.1 | 85.3 |
| 10. | O. taurii_8569 | 68.7 | 33.7 | 69 | 40.2 | 68.2 | 56.9 | 25.9 | 25.3 | 67.9 | | 47.7 | 23 | 53 |
| 11. | P. pinaster_TA4183_71647 | 79.4 | 32.9 | 78.4 | 33.1 | 79.9 | 54.9 | 31.3 | 29.7 | 79.7 | 64.8 | | 22.7 | 67.7 |
| 12. | P. tricornutum_23811 | 31.7 | 59.4 | 31.7 | 62.2 | 32.2 | 25.9 | 12.4 | 12.2 | 32.1 | 30.7 | 32.3 | | 24.1 |
| 13. | S. bicolor_Sb05g008680.1 | 98.4 | 33.6 | 93.7 | 34.5 | 92.2 | 55.3 | 38.7 | 37.3 | 92 | 68.5 | 79.7 | 32.4 | |
| 14. | S. bicolor_TA25485_4558 | 98.1 | 33.5 | 93.5 | 34.4 | 92 | 55.3 | 38.7 | 37.3 | 91.7 | 68.2 | 79.4 | 32.3 | 99.7 |
| 15. | S. officinarum_TA35690_4547 | 42.2 | 14.8 | 39.5 | 15 | 38.8 | 26.6 | 81.2 | 78.8 | 38.5 | 28 | 32.6 | 14.7 | 42.2 |
| 16. | T. aestivum_c54899571@13348 | 93.5 | 33 | 97.5 | 34.5 | 92 | 55.3 | 39 | 36.8 | 91.7 | 68.7 | 78.9 | 31.7 | 93.5 |
| 17. | T. aestivum_CV772651 | 34.3 | 12.9 | 36.8 | 14.1 | 34.2 | 23.1 | 76.6 | 78.3 | 34.5 | 25.6 | 28.1 | 13 | 34.6 |
| 18. | T. aestivum_TA67133_4565 | 93.7 | 33 | 98.1 | 34.6 | 92.2 | 54.8 | 39.2 | 37.1 | 92 | 69 | 79.2 | 31.9 | 93.7 |
| 19. | T. pseudonana_35896 | 66 | 28.7 | 65.4 | 28.9 | 65.5 | 52.8 | 27.1 | 25.7 | 65.2 | 60.9 | 64.3 | 33.9 | 66.8 |
| 20. | V. carteri_59470 | 66.3 | 37.1 | 65.8 | 35.9 | 66.6 | 50.6 | 25.9 | 25.9 | 66.6 | 65.1 | 69.1 | 31.6 | 66.3 |
| 21. | Z. mays_c57808725gm030403@2572 | 75.2 | 25.7 | 71.1 | 26.7 | 69.5 | 47.7 | 49.5 | 47.7 | 69.3 | 54.2 | 59.9 | 24.6 | 74.9 |
| 22. | Z. mays_DQ244248 | 66.8 | 23.4 | 62.4 | 23.7 | 61.5 | 40.4 | 54.4 | 51.7 | 61.2 | 46.9 | 52.6 | 21.8 | 66.2 |
| 23. | Z. mays_ZM07MC01636_57808725 | 98.1 | 33.3 | 93.5 | 34.2 | 91.4 | 55.6 | 38.1 | 37.1 | 91.2 | 69 | 78.6 | 31.6 | 98.1 |
| 24. | A. thaliana_AT2G05830.1 | 83.2 | 33.1 | 84.5 | 34.4 | 82.6 | 55.1 | 32.9 | 32.4 | 82.4 | 69.5 | 80.2 | 31.6 | 83.2 |
| 25. | B. napus_DY025654 | 52 | 19.9 | 52.3 | 21 | 50.3 | 35.7 | 53.2 | 51.1 | 50 | 44.2 | 48.4 | 19.3 | 52.3 |
| 26. | C. clementina_DY262513 | 78.7 | 30.7 | 77.9 | 29.8 | 75.4 | 53.7 | 37.4 | 35.6 | 75.1 | 61.2 | 70.8 | 28.8 | 78.5 |
| 27. | C. clementina_DY262587 | 51.5 | 19.3 | 51.5 | 19.6 | 48.7 | 35.4 | 55.8 | 52.4 | 48.4 | 39.6 | 46.4 | 18.2 | 51.8 |
| 28. | C. clementina_DY263526 | 51.5 | 18.9 | 50.1 | 18.9 | 49.5 | 33.3 | 56.9 | 54.2 | 49.2 | 39.4 | 46.9 | 17.7 | 51.5 |
| 29. | C. clementina_DY268933 | 68.4 | 26 | 67.6 | 25.7 | 65.2 | 48.5 | 44.7 | 41.6 | 65 | 53.6 | 60.9 | 24 | 68.1 |
| 30. | C. clementina_TA2451_85681 | 79.6 | 29.7 | 79 | 29.5 | 76.2 | 56 | 38.2 | 36.4 | 75.9 | 62.3 | 71.4 | 28.2 | 79.3 |
| 31. | C. tinctorius_TA325_4222 | 85.4 | 32.5 | 84.1 | 33.4 | 84.2 | 55.8 | 34.5 | 32.6 | 84 | 69.5 | 80.2 | 31.8 | 84.6 |
| 32. | G. max_Glyma09g08190.1 | 60.5 | 23.9 | 60.5 | 25.7 | 58.6 | 42.1 | 44.1 | 42.7 | 58.3 | 50.7 | 56.5 | 23.1 | 61 |
| 33. | H. tuberosus_TA3030_4233 | 86.3 | 33.3 | 84.9 | 33.9 | 86.4 | 56.7 | 35.2 | 33.6 | 86.1 | 71 | 80.2 | 31.5 | 86.3 |
| 34. | I. nil_CJ747673 | 46.9 | 17.7 | 45.5 | 17.4 | 44.9 | 30.4 | 61.5 | 57.2 | 44.7 | 36.9 | 42.7 | 16.8 | 46.9 |
| 35. | L. virosa_TA2328_75947 | 67.6 | 25.8 | 67.3 | 26.2 | 66.3 | 48.5 | 44.1 | 41.7 | 66 | 55 | 62 | 24 | 67 |
| 36. | P. nigra_TA2942_3691 | 30.5 | 11.7 | 30 | 12.3 | 29.4 | 21.9 | 67.1 | 68.4 | 29.1 | 25.1 | 28.4 | 12.4 | 30 |
| 37. | P. trichocarpa_832064 | 83.1 | 34 | 81.3 | 35.1 | 82.8 | 54.2 | 34.6 | 33.1 | 82.6 | 67.4 | 79.7 | 32.7 | 82.8 |
| 38. | P. trichocarpa_scaff_VI.1535 | 85.1 | 33 | 83.5 | 34 | 84.3 | 54.7 | 35.5 | 33.9 | 84 | 68 | 78.9 | 31.6 | 84.8 |
| 39. | V. shuttleworthii_CN604099 | 30.8 | 12.6 | 30.8 | 13.3 | 28.9 | 20.8 | 65.8 | 68.4 | 28.6 | 24.5 | 28.4 | 11.8 | 30.8 |
| 40. | V. vinifera_GSVIVT00016416001 | 85.9 | 33.4 | 85.4 | 34.7 | 85.6 | 54 | 34.6 | 33.2 | 85.4 | 68.6 | 79.7 | 31.6 | 85.4 |
| 41. | V. vinifera_TA40906_29760 | 85.9 | 33.3 | 85.4 | 34.7 | 85.6 | 54 | 34.6 | 33.2 | 85.4 | 68.6 | 79.7 | 31.6 | 85.4 |
| | | 14 | 15 | 16 | 17 | 18 | 19 | 20 | 21 | 22 | 23 | 24 | 25 | 26 |
| 1. | Saccof_IDI2 | 96.5 | 40.3 | 88 | 31.3 | 88.3 | 46.9 | 52.3 | 73.3 | 65.1 | 96.5 | 67.2 | 41.5 | 64.7 |
| 2. | Chlorella_140697 | 25.2 | 10.1 | 25.3 | 9.8 | 25.3 | 20.7 | 30.1 | 20.1 | 17.8 | 25.4 | 26 | 15.4 | 23.3 |
| 3. | H. vulgare_TA31842_4513 | 87.2 | 35.1 | 95.6 | 35.7 | 96.2 | 45.3 | 51.6 | 66.8 | 58.9 | 88.6 | 67.5 | 41.2 | 63.4 |
| 4. | O. RCC809_50296 | 26.1 | 10.9 | 26.1 | 10.3 | 26.2 | 20.4 | 27.3 | 20.2 | 17.9 | 26 | 26.6 | 16 | 22 |
| 5. | O. sativa.indica_BGIOSIBCE033922 | 85 | 35 | 84.2 | 30.7 | 84.5 | 46.6 | 50.6 | 63.9 | 56.1 | 84.5 | 65.7 | 39 | 59.7 |
| 6. | O. sativa.indica_BGIOSIBSE037940 | 39.1 | 16.2 | 40.4 | 15.7 | 39.9 | 37.1 | 37.8 | 31 | 24.7 | 39.7 | 39.2 | 22.3 | 35.8 |
| 7. | O. sativa_CR292756 | 35.9 | 73.7 | 35.3 | 69.6 | 35.6 | 19.2 | 18.7 | 45.4 | 49.6 | 35.1 | 24.9 | 39.5 | 29.6 |
| 8. | O. sativa_CX116019 | 33.7 | 71.3 | 32.6 | 69.9 | 32.9 | 17.9 | 18.6 | 43 | 46.5 | 33.2 | 24.1 | 38.2 | 28.2 |
| 9. | O. sativa_Os11g0216900 | 85 | 35 | 84.2 | 30.7 | 84.5 | 46.4 | 50.6 | 63.9 | 56.1 | 84.5 | 65.4 | 38.7 | 59.7 |
| 10. | O. taurii_8569 | 52.8 | 20.8 | 52.6 | 18.1 | 52.5 | 44.3 | 51.1 | 42.1 | 36.3 | 53.3 | 53.8 | 33.1 | 44.4 |
| 11. | P. pinaster_TA4183_71647 | 67.4 | 26 | 66.9 | 23.7 | 67.2 | 43.6 | 52.5 | 51 | 43.8 | 67.2 | 64.3 | 36.9 | 56.8 |
| 12. | P. tricornutum_23811 | 24 | 10.3 | 23.2 | 8.8 | 23.2 | 25.2 | 23.7 | 18.4 | 15.8 | 24.1 | 22.6 | 13.3 | 20.3 |
| 13. | S. bicolor_Sb05g008680.1 | 99.7 | 40.6 | 87.7 | 31.3 | 88 | 47.4 | 52.1 | 72.2 | 63.8 | 95.9 | 67.2 | 41.2 | 63.9 |
| 14. | S. bicolor_TA25485_4558 | | 40.6 | 87.5 | 31.3 | 87.7 | 47.4 | 51.9 | 71.9 | 63.5 | 95.6 | 66.9 | 41 | 63.6 |
| 15. | S. officinarum_TA35690_4547 | 42.2 | | 34.9 | 63.5 | 35.1 | 19.5 | 20.4 | 51.2 | 55.2 | 39.2 | 25.4 | 41.2 | 31.6 |
| 16. | T. aestivum_c54899571@13348 | 93.2 | 39.2 | | 36.2 | 99.5 | 45.3 | 52.1 | 67 | 58.6 | 88.6 | 66.7 | 40.4 | 63.1 |
| 17. | T. aestivum_CV772651 | 34.6 | 72.4 | 37.3 | 36.5 | 16.4 | 19.5 | 41 | 44.4 | 31.6 | 23.3 | 36.1 | 27.9 | |
| 18. | T. aestivum_TA67133_4565 | 93.5 | 39.5 | 99.5 | 37.6 | | 45.3 | 51.9 | 67 | 58.9 | 88.8 | 66.9 | 41 | 63.4 |
| 19. | T. pseudonana_35896 | 66.8 | 29.8 | 66.2 | 27.6 | 66.2 | | 41.3 | 35.5 | 31.2 | 46.6 | 44.3 | 28.1 | 39.6 |
| 20. | V. carteri_59470 | 66.1 | 27.4 | 66.6 | 26.2 | 66.6 | 56.9 | | 42.1 | 36.9 | 51.6 | 52.5 | 33.9 | 45.7 |
| 21. | Z. mays_c57808725gm030403@2572 | 74.7 | 54.4 | 71.4 | 44.5 | 71.1 | 51.5 | 52.1 | | 86.6 | 74.7 | 51.6 | 54 | 61 |
| 22. | Z. mays_DQ244248 | 65.9 | 59.1 | 62.1 | 48.3 | 62.4 | 47.2 | 45.6 | 88 | | 65.9 | 45.5 | 58.9 | 53.9 |
| 23. | Z. mays_ZM07MC01636_57808725 | 97.8 | 41.4 | 93.5 | 34.3 | 93.7 | 66.8 | 66.6 | 75.5 | 66.8 | | 66.9 | 41.5 | 64.5 |
| 24. | A. thaliana_AT2G05830.1 | 82.9 | 35.8 | 84.5 | 31.6 | 84.5 | 65.8 | 67.8 | 63.6 | 56.4 | 82.4 | | 54.7 | 64.8 |
| 25. | B. napus_DY025654 | 52 | 55.4 | 51.8 | 48.5 | 52.3 | 41 | 42.9 | 67.1 | 73.7 | 51.8 | 57.8 | | 48.6 |
| 26. | C. clementina_DY262513 | 78.2 | 40.5 | 78.2 | 35.3 | 78.5 | 57.9 | 62.1 | 71.8 | 63.2 | 78.7 | 79.9 | 60.9 | |
| 27. | C. clementina_DY262587 | 51.5 | 58.4 | 51 | 51.5 | 51.2 | 37.3 | 41.4 | 66.8 | 71.4 | 51.8 | 53.2 | 82.4 | 63.5 |
| 28. | C. clementina_DY263526 | 51.2 | 60.9 | 50.1 | 53.8 | 50.4 | 37.3 | 40.6 | 65 | 71.8 | 51.5 | 52.9 | 82.8 | 63.2 |
| 29. | C. clementina_DY268933 | 67.8 | 48.1 | 67.8 | 42 | 68.1 | 51.5 | 54.4 | 81.9 | 75.8 | 68.1 | 70.1 | 71.3 | 82.8 |
| 30. | C. clementina_TA2451_85681 | 79 | 41.1 | 79.3 | 35.9 | 79.6 | 58.2 | 63.6 | 72.3 | 65 | 79.3 | 80.2 | 60.9 | 92.8 |
| 31. | C. tinctorius_TA325_4222 | 84.6 | 35.8 | 84.6 | 32.1 | 84.9 | 66.5 | 67.3 | 64.7 | 57.4 | 84.9 | 84.2 | 53.6 | 78.4 |
| 32. | G. max_Glyma09g08190.1 | 60.8 | 47.2 | 60.5 | 41.3 | 60.8 | 48.3 | 47.9 | 73.8 | 73.8 | 61 | 62.6 | 73.1 | 68.1 |
| 33. | H. tuberosus_TA3030_4233 | 86 | 36 | 85.8 | 32 | 85.8 | 68.1 | 66.8 | 65.6 | 58.1 | 86 | 85.3 | 53 | 78.2 |
| 34. | I. nil_CJ747673 | 46.6 | 63 | 46 | 56.3 | 46.3 | 35.7 | 37.2 | 60.4 | 65.6 | 47.4 | 45.7 | 73.8 | 52.6 |
| 35. | L. virosa_TA2328_75947 | 67.3 | 45.5 | 67.8 | 41 | 68.1 | 54.2 | 53.6 | 80.7 | 72.1 | 67.6 | 66.6 | 67.9 | 73.9 |
| 36. | P. nigra_TA2942_3691 | 30 | 62.4 | 30 | 69.3 | 30.2 | 24.9 | 24.2 | 38.9 | 42.9 | 30.2 | 29.9 | 49.4 | 32.8 |
| 37. | P. trichocarpa_832064 | 82.6 | 36.5 | 82 | 31.8 | 82 | 62.5 | 68.6 | 64.3 | 57.3 | 83.1 | 84.6 | 52.9 | 77.1 |
| 38. | P. trichocarpa_scaff_VI.1535 | 84.5 | 37.9 | 84.3 | 32.5 | 84.3 | 63.7 | 68.3 | 65.3 | 58.7 | 84.8 | 85.6 | 54.1 | 78.9 |
| 39. | V. shuttleworthii_CN604099 | 30.8 | 65.3 | 30.8 | 71.3 | 31.6 | 23.1 | 23.7 | 40.3 | 44 | 31.3 | 29.9 | 47.6 | 33 |
| 40. | V. vinifera_GSVIVT00016416001 | 85.4 | 36.7 | 84.6 | 31.9 | 84.8 | 64.9 | 67.8 | 66 | 58.8 | 85.4 | 85.4 | 52.9 | 79 |
| 41. | V. vinifera_TA40906_29760 | 85.4 | 36.7 | 84.6 | 31.9 | 84.8 | 64.9 | 67.8 | 66 | 58.8 | 85.4 | 85.1 | 52.9 | 79 |

| | | 27 | 28 | 29 | 30 | 31 | 32 | 33 | 34 |
|---|---|---|---|---|---|---|---|---|---|
| 1. | Saccof_IDI2 | 42.2 | 42.2 | 58.6 | 67.6 | 73.7 | 48.8 | 75.1 | 38.1 |
| 2. | Chlorella_140697 | 14.6 | 14.3 | 20.3 | 22.9 | 24.7 | 18.3 | 24.8 | 13.4 |
| 3. | H. vulgare_TA31842_4513 | 41.7 | 40.4 | 57 | 65.7 | 71.5 | 47.2 | 72.7 | 36.7 |
| 4. | O. RCC809_50296 | 13.8 | 13.5 | 19.7 | 22.2 | 24.8 | 19 | 26 | 12.4 |
| 5. | O. sativa.indica_BGIOSIBCE033922 | 38.9 | 38.9 | 53.7 | 62.6 | 69.9 | 45 | 72.1 | 36.4 |
| 6. | O. sativa.indica_BGIOSIBSE037940 | 20.5 | 20.2 | 32.1 | 37.7 | 40.9 | 26 | 40.5 | 18.1 |
| 7. | O. sativa_CR292756 | 44.2 | 45.8 | 35.5 | 30.3 | 28 | 34.5 | 29 | 50 |
| 8. | O. sativa_CX116019 | 42.1 | 43.6 | 33.4 | 28.6 | 26.4 | 33.8 | 27.4 | 47.1 |
| 9. | O. sativa_Os11g0216900 | 38.9 | 38.9 | 53.7 | 62.6 | 69.9 | 45 | 72.1 | 36.4 |
| 10. | O. taurii_8569 | 27 | 27 | 39.4 | 44.9 | 51.3 | 36.1 | 52.1 | 27.5 |
| 11. | P. pinaster_TA4183_71647 | 36.7 | 36.7 | 50.5 | 58.5 | 65.4 | 43.8 | 66.7 | 33.6 |
| 12. | P. tricornutum_23811 | 12.3 | 11.8 | 17.8 | 20.3 | 23.4 | 16.3 | 23.6 | 11.3 |
| 13. | S. bicolor_Sb05g008680.1 | 41.7 | 41.7 | 57.8 | 66.8 | 73.9 | 47.5 | 75.7 | 38.3 |
| 14. | S. bicolor_TA25485_4558 | 41.4 | 41.4 | 57.5 | 66.5 | 73.9 | 47.2 | 75.4 | 38.1 |
| 15. | S. officinarum_TA35690_4547 | 45.9 | 48 | 36.9 | 31.8 | 28.8 | 36.7 | 29 | 49 |
| 16. | T. aestivum_c54899571@13348 | 40.9 | 39.6 | 56.4 | 65.2 | 71.5 | 47.7 | 73.2 | 36.5 |
| 17. | T. aestivum_CV772651 | 40.3 | 41.8 | 33.1 | 28.3 | 25.9 | 33.2 | 26.6 | 40.9 |
| 18. | T. aestivum_TA67133_4565 | 41.2 | 39.8 | 56.7 | 65.4 | 71.8 | 48 | 73.5 | 36.7 |
| 19. | T. pseudonana_35896 | 26 | 25.7 | 35.7 | 39.9 | 44.9 | 31.5 | 45.9 | 25.1 |
| 20. | V. carteri_59470 | 30.4 | 29.6 | 41.7 | 47.4 | 50.9 | 36.6 | 50.9 | 27.5 |
| 21. | Z. mays_c57808725gm030403@2572 | 54.5 | 53.4 | 71.4 | 62.5 | 55.3 | 60.6 | 57.1 | 48.8 |
| 22. | Z. mays_DQ244248 | 58.3 | 58.3 | 64.3 | 55.5 | 48.8 | 60.3 | 49.9 | 52.8 |
| 23. | Z. mays_ZM07MC01636_57808725 | 42.2 | 42.2 | 58.3 | 67 | 73.1 | 48.5 | 74.5 | 38.3 |
| 24. | A. thaliana_AT2G05830.1 | 42.1 | 41.5 | 58.7 | 66.8 | 72.2 | 50.5 | 74.6 | 38.5 |
| 25. | B. napus_DY025654 | 63.7 | 64.6 | 57.6 | 49.3 | 44.4 | 59.9 | 44 | 59.3 |
| 26. | C. clementina_DY262513 | 62.4 | 61.8 | 82.5 | 88 | 66.6 | 57.9 | 67.8 | 43.8 |
| 27. | C. clementina_DY262587 | | 90.6 | 74.1 | 63.3 | 43.2 | 57.8 | 44.7 | 63.2 |
| 28. | C. clementina_DY263526 | 92.7 | | 73.4 | 62.4 | 43.5 | 58.5 | 44.7 | 65 |
| 29. | C. clementina_DY268933 | 75.8 | 75.8 | | 84.3 | 60.5 | 65.5 | 61.7 | 51.4 |
| 30. | C. clementina_TA2451_85681 | 64.4 | 63.8 | 84.5 | | 70.2 | 57 | 70.3 | 43.9 |
| 31. | C. tinctorius_TA325_4222 | 52.3 | 52 | 69 | 80.3 | | 49.1 | 88.4 | 38.8 |
| 32. | G. max_Glyma09g08190.1 | 68.9 | 68.2 | 78.5 | 67.6 | 62.3 | | 49.5 | 51.7 |
| 33. | H. tuberosus_TA3030_4233 | 52.2 | 51.6 | 68.8 | 79.3 | 93.8 | 62.4 | | 38.9 |
| 34. | I. nil_CJ747673 | 76.8 | 79.1 | 62.1 | 53.1 | 47.7 | 63.3 | 47.3 | |
| 35. | L. virosa_TA2328_75947 | 66.6 | 67.2 | 85.7 | 74.6 | 72.8 | 74.8 | 73.1 | 61 |
| 36. | P. nigra_TA2942_3691 | 49.4 | 50.7 | 39.6 | 33.8 | 31 | 40.9 | 30.6 | 54.8 |
| 37. | P. trichocarpa_832064 | 51.6 | 51.3 | 67.7 | 78.6 | 84.1 | 60.4 | 84.9 | 45.8 |
| 38. | P. trichocarpa_scaff_VI.1535 | 53.1 | 51.5 | 69.3 | 80.3 | 85.9 | 61.6 | 86.4 | 46.9 |
| 39. | V. shuttleworthii_CN604099 | 50.2 | 51.6 | 39.9 | 33.8 | 30.2 | 40.9 | 29.8 | 54.3 |
| 40. | V. vinifera_GSVIVT00016416001 | 52.7 | 51.9 | 68.9 | 79.5 | 84.8 | 59.8 | 86.2 | 46.5 |
| 41. | V. vinifera_TA40906_29760 | 52.7 | 51.9 | 68.9 | 79.5 | 84.8 | 61.2 | 86.2 | 46.5 |

| | | 35 | 36 | 37 | 38 | 39 | 40 | 41 |
|---|---|---|---|---|---|---|---|---|
| 1. | Saccof_IDI2 | 56.5 | 24.5 | 72.2 | 74.2 | 25.2 | 71.7 | 72 |
| 2. | Chlorella_140697 | 20.3 | 9.1 | 25.7 | 25.2 | 10 | 25.8 | 25.8 |
| 3. | H. vulgare_TA31842_4513 | 55.9 | 23.9 | 69.4 | 71.3 | 24.1 | 71.2 | 71.4 |
| 4. | O. RCC809_50296 | 20.1 | 8.7 | 26.2 | 25.6 | 9.2 | 25.4 | 25.4 |
| 5. | O. sativa.indica_BGIOSIBCE033922 | 54.5 | 24.3 | 68.8 | 69.4 | 23.2 | 68.9 | 69.1 |
| 6. | O. sativa.indica_BGIOSIBSE037940 | 32.7 | 14.2 | 39.9 | 41.2 | 13.5 | 40.1 | 40.1 |
| 7. | O. sativa_CR292756 | 34.1 | 54.2 | 28.6 | 29.1 | 52.1 | 26.6 | 26.6 |
| 8. | O. sativa_CX116019 | 32.4 | 55 | 26.8 | 27.5 | 52.9 | 25.3 | 25.3 |
| 9. | O. sativa_Os11g0216900 | 54.5 | 24.3 | 68.8 | 69.4 | 23.2 | 68.9 | 69.1 |
| 10. | O. taurii_8569 | 41.6 | 17 | 51.9 | 50.8 | 17.4 | 51.3 | 51.3 |
| 11. | P. pinaster_TA4183_71647 | 49.7 | 23.1 | 67 | 67 | 22.7 | 63.8 | 64.1 |
| 12. | P. tricornutum_23811 | 16.7 | 8.6 | 23.9 | 23.2 | 8.5 | 23.2 | 23.2 |
| 13. | S. bicolor_Sb05g008680.1 | 56.2 | 23.9 | 71.4 | 73.4 | 24.7 | 71.2 | 71.4 |
| 14. | S. bicolor_TA25485_4558 | 56.5 | 23.9 | 71.2 | 73.1 | 24.7 | 71.2 | 71.4 |
| 15. | S. officinarum_TA35690_4547 | 34.8 | 47.5 | 28.9 | 29.9 | 51.1 | 28.7 | 28.7 |
| 16. | T. aestivum_c54899571@13348 | 55.7 | 23.7 | 69.4 | 71 | 24.4 | 70.6 | 70.9 |
| 17. | T. aestivum_CV772651 | 32.4 | 52.2 | 25.5 | 26.1 | 54.5 | 25.5 | 25.5 |
| 18. | T. aestivum_TA67133_4565 | 55.9 | 23.9 | 69.4 | 71.3 | 24.9 | 70.9 | 71.2 |
| 19. | T. pseudonana_35896 | 36.3 | 18.7 | 44.9 | 45.7 | 16.1 | 45 | 45 |
| 20. | V. carteri_59470 | 41.8 | 18.7 | 52.7 | 52.2 | 19.1 | 53.2 | 53.2 |
| 21. | Z. mays_c57808725gm030403@2572 | 67.9 | 31.2 | 55.2 | 56.3 | 32.5 | 53.7 | 53.7 |
| 22. | Z. mays_DQ244248 | 60.3 | 34.3 | 49.5 | 50.7 | 35.5 | 47.3 | 47.3 |
| 23. | Z. mays_ZM07MC01636_57808725@1630 | 56.8 | 24.2 | 71.9 | 73.4 | 25.5 | 71.7 | 72 |
| 24. | A. thaliana_AT2G05830.1 | 57.2 | 25 | 72.7 | 73.4 | 24.9 | 71.9 | 71.9 |
| 25. | B. napus_DY025654 | 56.4 | 38.9 | 44.7 | 45.7 | 39 | 43.2 | 43.2 |
| 26. | C. clementina_DY262513 | 65.9 | 27.1 | 67.2 | 68.8 | 29.6 | 67.6 | 67.6 |
| 27. | C. clementina_DY262587 | 56.1 | 40.9 | 44.3 | 45.6 | 44.6 | 44 | 44 |
| 28. | C. clementina_DY263526 | 56.5 | 41 | 44.5 | 44.3 | 45.8 | 43.8 | 43.8 |
| 29. | C. clementina_DY268933 | 76.5 | 32.5 | 60.7 | 62.1 | 35.5 | 60.2 | 60.2 |
| 30. | C. clementina_TA2451_85681 | 66.6 | 27.8 | 69.6 | 71 | 30 | 70.1 | 70.4 |
| 31. | C. tinctorius_TA325_4222 | 67.9 | 25.5 | 74.7 | 76.1 | 25.9 | 74.5 | 74.5 |
| 32. | G. max_Glyma09g08190.1 | 62.6 | 33.9 | 51.8 | 52.5 | 36.2 | 49.9 | 50.7 |
| 33. | H. tuberosus_TA3030_4233 | 68.5 | 25.7 | 75.3 | 76.7 | 26.1 | 74.3 | 74.5 |
| 34. | I. nil_CJ747673 | 50.9 | 46.7 | 39.2 | 39.9 | 46.6 | 38 | 38 |
| 35. | L. virosa_TA2328_75947 | | 32.1 | 58.1 | 59.5 | 33.1 | 57.4 | 57.4 |
| 36. | P. nigra_TA2942_3691 | 40 | | 34.1 | 34.9 | 71.1 | 26.6 | 26.6 |
| 37. | P. trichocarpa_832064 | 66.9 | 34.9 | | 96.9 | 27.1 | 75.5 | 75.5 |
| 38. | P. trichocarpa_scaff_VI.1535 | 68.5 | 35.7 | 97.1 | | 27.2 | 76.1 | 76.1 |
| 39. | V. shuttleworthii_CN604099 | 39.3 | 77.5 | 30.5 | 30.7 | | 35.4 | 35.4 |
| 40. | V. vinifera_GSVIVT00016416001 | 67.6 | 30.3 | 85.2 | 86.7 | 35.4 | | 99.7 |
| 41. | V. vinifera_TA40906_29760 | 67.6 | 30.3 | 85.4 | 87 | 35.4 | 100 | |

3.4. eIF4F-Like Protein Complex

[0694] Global percentages of similarity and identity between full length polypeptide sequences useful in performing the methods of the invention were determined using one of the methods available in the art, the MatGAT (Matrix Global Alignment Tool) software (BMC Bioinformatics. 2003 4:29. MatGAT: an application that generates similarity/identity matrices using protein or DNA sequences. Campanella J J, Bitincka L, Smalley J; software hosted by Ledion Bitincka). MatGAT software generates similarity/identity matrices for DNA or protein sequences without needing pre-alignment of the data. The program performs a series of pair-wise alignments using the Myers and Miller global alignment algorithm (with a gap opening penalty of 12, and a gap extension penalty of 2), calculates similarity and identity using for example Blosum 62 (for polypeptides), and then places the results in a distance matrix. Sequence sequence identity is shown in the top half of the diagonal dividing line.

[0695] Parameters used in the comparison were:
[0696] Scoring matrix: Blosum62
[0697] First Gap: 12
[0698] Extending gap: 2

[0699] Results of the software analysis are shown in Table B4 for the global identity over the full length of the polypeptide sequences. Percentage identity is given above the diagonal and percentage similarity is given below the diagonal.

[0700] The percentage identity between eIF4 isoG polypeptide sequences useful in performing the methods of the invention can be as low as 56.4% amino acid identity compared to SEQ ID NO: 241.

TABLE B4
MatGAT results for global identity over the full length of the polypeptide sequences -
Examples of identity with eIF4isoG-like polypeptides

| | | 1 | 2 | 3 | 4 | 5 | 6 | 7 | 8 | 9 | 10 | 11 | 12 | 13 | 14 |
|---|---|---|---|---|---|---|---|---|---|---|---|---|---|---|---|
| 1. | Os_eIF4isoG | | 56.4 | 61.6 | 59.7 | 61 | 67 | 60.8 | 60.3 | 61.2 | 80.2 | 58.9 | 77.2 | 62.5 | 62.1 |
| 2. | A. thaliana_AT5G57870.1 | | | 66.8 | 63.9 | 63.7 | 54.6 | 57.9 | 65.9 | 68.3 | 58.5 | 60.7 | 55.3 | 65.8 | 62.1 |
| 3. | G. max_Gm0025x00623 | | | | 76.4 | 80.8 | 58.9 | 65.8 | 75.2 | 74 | 61 | 69 | 59.1 | 75.1 | 69.5 |
| 4. | G. max_Gm0071x00063 | | | | | 73.5 | 57.3 | 65.2 | 70.4 | 70.1 | 59.8 | 65 | 56.9 | 71.3 | 68.3 |
| 5. | M. truncatula_AC140546_1.5 | | | | | | 58.6 | 64.3 | 69.1 | 69.1 | 60 | 67.5 | 58.9 | 71 | 67.4 |
| 6. | O. sativa_Os02g0611500 | | | | | | | 59.8 | 58.7 | 58.5 | 69.4 | 58 | 64.8 | 60.6 | 61.9 |
| 7. | P. trichocarpa_835841 | | | | | | | | 66.7 | 64.9 | 61.4 | 64.2 | 58.9 | 69.8 | 71.2 |
| 8. | P. trichocarpa_835945 | | | | | | | | | 82.4 | 61.2 | 69.2 | 57.9 | 75 | 70.4 |
| 9. | R. communis_TA1365_3988 | | | | | | | | | | 62.6 | 67.7 | 58.9 | 75 | 69.4 |
| 10. | S. bicolor_5286647 | | | | | | | | | | | 59.6 | 77.8 | 63.2 | 61.9 |
| 11. | S. tuberosum_TA26995_4113 | | | | | | | | | | | | 58.1 | 70.6 | 66.3 |
| 12. | T. aestivum_TA60686_4565 | | | | | | | | | | | | | 59.9 | 60.2 |
| 13. | V. vinifera_GSVIVT00017187001 | | | | | | | | | | | | | | 75.8 |
| 14. | V. vinifera_GSVIVT00032790001 | | | | | | | | | | | | | | |

### 3.5. GR-RBP (Glycine Rich-RNA Binding Protein) Polypeptides

[0701] Global percentages of similarity and identity between full length polypeptide sequences useful in performing the methods of the invention were determined using one of the methods available in the art, the MatGAT (Matrix Global Alignment Tool) software (BMC Bioinformatics. 2003 4:29. MatGAT: an application that generates similarity/identity matrices using protein or DNA sequences. Campanella J J, Bitincka L, Smalley J; software hosted by Ledion Bitincka). MatGAT software generates similarity/identity matrices for DNA or protein sequences without needing pre-alignment of the data. The program performs a series of pair-wise alignments using the Myers and Miller global alignment algorithm (with a gap opening penalty of 12, and a gap extension penalty of 2), calculates similarity and identity using for example Blosum 62 (for polypeptides), and then places the results in a distance matrix. Sequence similarity is shown in the bottom half of the dividing line and sequence identity is shown in the top half of the diagonal dividing line.

[0702] Parameters used in the comparison were:
[0703] Scoring matrix: Blosum62
[0704] First Gap: 12
[0705] Extending gap: 2

[0706] Results of the software analysis are shown in Table B5 for the global similarity and identity over the full length of the polypeptide sequences of the group A GR-RBP proteins. The percentage identity between the GR-RBP polypeptide sequences useful in performing the methods of the invention can be as low as 10.3% amino acid identity compared to SEQ ID NO: 827. This percentage remains the same when also the sequences of group B GR-RBP proteins are included in the analysis.

TABLE B5
MatGAT results for global similarity and identity over the full length of the polypeptide sequences.

| | | 1 | 2 | 3 | 4 | 5 | 6 | 7 | 8 | 9 |
|---|---|---|---|---|---|---|---|---|---|---|
| 1. | O. sativa_LOC_Os12g31800.1 | | 35 | 32.3 | 28.9 | 35 | 28.9 | 38 | 50.3 | 31.1 |
| 2. | A. thaliana_AT4G13850.2 | 46.5 | | 94.1 | 84.3 | 96.1 | 64.7 | 96.8 | 30.8 | 73.4 |
| 3. | A. thaliana_AT4G13850.3 | 43.8 | 94.1 | | 89.6 | 94 | 68.1 | 91.1 | 28.8 | 77.9 |
| 4. | A. thaliana_AT4G13850.4 | 39.5 | 84.3 | 89.6 | | 84 | 67.6 | 81.6 | 25 | 73.2 |
| 5. | Arabidopsis_thaliana_AJ002892 | 46.1 | 96.7 | 94.7 | 84.7 | | 66.7 | 93 | 30.5 | 76.8 |
| 6. | Arabidopsis_thaliana_AY097374 | 39.1 | 75.8 | 79.2 | 78.7 | 76.7 | | 62 | 26.7 | 70.1 |
| 7. | Arabidopsis_thaliana_BT002197 | 49.2 | 96.8 | 91.1 | 81.6 | 93.7 | 72.2 | | 32.5 | 71.1 |
| 8. | Arabidopsis_thaliana_BT006315 | 62.3 | 41.2 | 39.1 | 34.6 | 39.8 | 37.4 | 42.9 | | 28.7 |
| 9. | B. napus_BN06MC14993_44009177@14945 | 40.7 | 80.4 | 85.4 | 80.3 | 83.3 | 81 | 77.8 | 36.3 | |
| 10. | B. napus_BN06MC33239_51481786@33086 | 32.9 | 51.6 | 54.9 | 61.2 | 52.7 | 58.1 | 50 | 30.4 | 54.2 |
| 11. | Bambusa_oldhamii_EU076902 | 49.6 | 70.4 | 70.4 | 64.8 | 72.2 | 61.1 | 71.6 | 42.6 | 68.5 |
| 12. | E. lagascae_s_el01277_t@402 | 41.1 | 66.7 | 70.8 | 75.8 | 67.3 | 74.3 | 64.6 | 33.6 | 71.8 |
| 13. | G. max_GM06MC37402_su20g11@36531 | 62.4 | 46.9 | 44.5 | 40.4 | 46.1 | 40.8 | 48.6 | 60.2 | 43.3 |
| 14. | H. vulgare_c63432693hv270303@6212 | 48.1 | 67.9 | 66.1 | 59.5 | 68.5 | 62.5 | 72 | 41.9 | 63.7 |
| 15. | H. vulgare_HV04MC07973_63432693@7969 | 30.6 | 50.3 | 52.1 | 58.1 | 50 | 55.9 | 49.4 | 27 | 54.2 |
| 16. | Hordeum_vulgare_subsp_vulgare_AK249796 | 64.2 | 39.8 | 37.5 | 33.4 | 39.1 | 33.8 | 41.5 | 61.2 | 35.8 |
| 17. | Hordeum_vulgare_subsp_vulgare_AK252775 | 49.2 | 69 | 66.1 | 60.1 | 68.5 | 63.1 | 72.6 | 42.6 | 64.3 |
| 18. | L. usitatissimum_c62280695@9780 | 45.7 | 77.8 | 78.5 | 73.2 | 80.7 | 73.2 | 77.2 | 39.1 | 78.5 |
| 19. | Nicotiana_sylvestris_D28862 | 43 | 75.8 | 78.5 | 75.7 | 76.7 | 75.7 | 73.4 | 38.4 | 76.4 |
| 20. | Nicotiana_tabacum_AY048972 | 61.7 | 45.8 | 43 | 39 | 44.4 | 40.4 | 46.2 | 62.6 | 40.1 |
| 21. | O. sativa_LOC_Os07g41120.1 | 35.1 | 23 | 21.6 | 19.8 | 22.4 | 19.4 | 23.6 | 34.7 | 20.8 |
| 22. | O. sativa_LOC_Os10g17454.2 | 59.6 | 36.9 | 34.4 | 31.5 | 37.2 | 31.9 | 38.5 | 57.7 | 34.4 |
| 23. | Oryza_sativa_Indica_Group_CT830471 | 46.1 | 73.2 | 73.3 | 66 | 74.7 | 67.3 | 70.9 | 39.4 | 67.3 |
| 24. | P. patens_167311 | 39.5 | 63.7 | 63.7 | 60.5 | 64.3 | 65.6 | 64.6 | 39.1 | 63.7 |
| 25. | P. patens_208328 | 41.5 | 63.2 | 62.6 | 61.9 | 63.9 | 63.9 | 62.7 | 35.3 | 61.9 |
| 26. | P. trichocarpa_707174 | 37.2 | 62.1 | 66 | 69.9 | 64 | 65.4 | 60.1 | 34.3 | 66.9 |
| 27. | Picea_sitchensis_EF083658 | 51.6 | 69.4 | 69.4 | 63.1 | 72.6 | 65 | 71.5 | 42.2 | 66.9 |
| 28. | Picea_sitchensis_EF086676 | 61.6 | 53.4 | 50.2 | 44.3 | 51.6 | 47.1 | 54.3 | 50.9 | 48.9 |
| 29. | Pisum_sativum_U81287 | 45.7 | 79.7 | 82.2 | 75.3 | 80 | 76.7 | 77.2 | 39.1 | 82.2 |
| 30. | Populus_trichocarpa_EF148189 | 64.3 | 47.3 | 44.8 | 40.7 | 46.5 | 43.6 | 49.8 | 59.5 | 43.2 |
| 31. | S. bicolor_Sb03g043760.1 | 43.8 | 74.5 | 73.5 | 70.1 | 75.3 | 72.1 | 72.8 | 38.8 | 72.8 |
| 32. | S. bicolor_Sb08g015580.1 | 82.2 | 48.4 | 44.8 | 40.8 | 46 | 40.8 | 49.6 | 62.6 | 42.4 |
| 33. | Solanum_lycopersicum_BT012756 | 67.1 | 45.5 | 43.2 | 39.7 | 44.4 | 41.6 | 48.2 | 60.9 | 42 |
| 34. | T. aestivum_c54626433@14323 | 50.8 | 65.7 | 62.3 | 58.3 | 65.1 | 57.7 | 69.1 | 43.9 | 62.3 |
| 35. | T. aestivum_c55526991@11638 | 70.5 | 54.3 | 51.6 | 47.5 | 54.3 | 48.4 | 55.7 | 58.1 | 48.9 |
| 36. | T. aestivum_c56257751@11019 | 52.3 | 68.8 | 63 | 57.8 | 64.7 | 57.8 | 71.1 | 45 | 62.4 |
| 37. | T. aestivum_TA06MC00270_56599813@270 | 53.5 | 67.6 | 61.9 | 56.8 | 64.2 | 56.8 | 69.9 | 45.7 | 61.4 |
| 38. | V. vinifera_GSVIVT00016201001 | 67.9 | 42.6 | 39.4 | 36.1 | 40.8 | 38.3 | 44.4 | 66.4 | 39 |
| 39. | Z. mays_ZM07MC15190_65293483@15154 | 76.7 | 46.6 | 43.4 | 39.8 | 45.4 | 39.8 | 48.2 | 59.5 | 44.2 |
| 40. | Z. mays_ZM07MC16747_65163049@16705 | 78.7 | 47.8 | 44.5 | 40.5 | 47 | 40.5 | 49.8 | 60.9 | 44.1 |
| 41. | Zea_mays_DQ245645 | 43.8 | 86.3 | 91 | 81.3 | 88 | 81.9 | 83.5 | 38.1 | 93.8 |
| 42. | Zea_mays_DQ245844 | 52.7 | 68 | 62.3 | 57.1 | 65.1 | 57.7 | 70.3 | 45.3 | 62.3 |
| 43. | Zea_mays_EU968589 | 45.3 | 76.5 | 72.5 | 68 | 75.8 | 68 | 75.3 | 39.8 | 69.9 |

| | | | 10 | 11 | 12 | 13 | 14 | 15 | 16 | 17 |
|---|---|---|---|---|---|---|---|---|---|---|
| 1. | O. sativa_LOC_Os12g31800.1 | | 23.6 | 34 | 28.3 | 47.8 | 36.2 | 20.3 | 51.8 | 36.5 |
| 2. | A. thaliana_AT4G13850.2 | | 32.3 | 54.9 | 53.6 | 35.5 | 55 | 34.8 | 30.1 | 55 |
| 3. | A. thaliana_AT4G13850.3 | | 34.2 | 54.3 | 56.9 | 33.1 | 53.2 | 36.8 | 28.6 | 52.4 |
| 4. | A. thaliana_AT4G13850.4 | | 38.2 | 50.6 | 57.7 | 29.3 | 47.1 | 40 | 24.7 | 47.1 |
| 5. | Arabidopsis_thaliana_AJ002892 | | 32.9 | 56.1 | 53.3 | 35.1 | 54.7 | 34.8 | 29.2 | 53.8 |
| 6. | Arabidopsis_thaliana_AY097374 | | 37.2 | 52.1 | 60.4 | 27.8 | 53 | 44.1 | 25.8 | 53 |
| 7. | Arabidopsis_thaliana_BT002197 | | 31.3 | 55.4 | 51.9 | 37.1 | 56.8 | 33.5 | 32.6 | 56.8 |
| 8. | Arabidopsis_thaliana_BT006315 | | 22.9 | 29.8 | 23.8 | 48.3 | 31 | 17.1 | 46.8 | 31 |
| 9. | B. napus_BN06MC14993_44009177@14945 | | 36.1 | 51.2 | 56.3 | 34.7 | 51.8 | 39.5 | 26.6 | 51.8 |
| 10. | B. napus_BN06MC33239_51481786@33086 | | | 30.1 | 37 | 29.8 | 34.5 | 48.3 | 19.1 | 34.5 |
| 11. | Bambusa_oldhamii_EU076902 | | 51.2 | | 53.7 | 37.1 | 67.3 | 45 | 28.2 | 67.8 |
| 12. | E. lagascae_s_el01277_t@402 | | 59.8 | 66 | | 28.6 | 45.8 | 40.4 | 25.4 | 45.9 |
| 13. | G. max_GM06MC37402_su20g11@36531 | | 37.6 | 52.7 | 42.4 | | 37.9 | 23.4 | 39.4 | 38.3 |
| 14. | H. vulgare_c63432693hv270303@6212 | | 45.2 | 80.4 | 59.5 | 51.4 | | 62.5 | 32.1 | 97.6 |
| 15. | H. vulgare_HV04MC07973_63432693@7969 | | 62.9 | 58 | 59.8 | 34.7 | 63.7 | | 19.9 | 64.9 |
| 16. | Hordeum_vulgare_subsp_vulgare_AK249796 | | 27.4 | 41.1 | 35.1 | 55.2 | 42.5 | 28.1 | | 32.7 |
| 17. | Hordeum_vulgare_subsp_vulgare_AK252775 | | 45.2 | 80.4 | 60.1 | 51.8 | 98.2 | 64.9 | 43.5 | |
| 18. | L. usitatissimum_c62280695@9780 | | 55.7 | 71 | 74.5 | 47.8 | 66.1 | 52.3 | 37.1 | 66.7 |
| 19. | Nicotiana_sylvestris_D28862 | | 57.6 | 69.8 | 70.8 | 45.7 | 63.7 | 56.3 | 34.8 | 64.3 |
| 20. | Nicotiana_tabacum_AY048972 | | 33.2 | 46.2 | 37.9 | 64.6 | 45.1 | 29.6 | 60.2 | 44.4 |
| 21. | O. sativa_LOC_Os07g41120.1 | | 17.8 | 23.6 | 19.2 | 32.9 | 23 | 15.8 | 36.9 | 23.2 |
| 22. | O. sativa_LOC_Os10g17454.2 | | 26.8 | 39.1 | 32.8 | 57.4 | 39.1 | 24.9 | 74.1 | 39.7 |
| 23. | Oryza_sativa_Indica_Group_CT830471 | | 52.7 | 83.3 | 69.3 | 48.2 | 76.2 | 59.3 | 38.1 | 76.2 |
| 24. | P. patens_167311 | | 52.2 | 65.4 | 58 | 46.5 | 62.5 | 49.7 | 36.8 | 63.1 |
| 25. | P. patens_208328 | | 51 | 66 | 60 | 46.1 | 63.1 | 53.5 | 36.1 | 63.7 |
| 26. | P. trichocarpa_707174 | | 57.9 | 59.3 | 79.7 | 42.4 | 54.2 | 55.6 | 33.1 | 54.8 |
| 27. | Picea_sitchensis_EF083658 | | 54.1 | 72.8 | 64.3 | 51.8 | 70.2 | 51 | 40.8 | 70.8 |
| 28. | Picea_sitchensis_EF086676 | | 38.5 | 56.6 | 45.7 | 64.1 | 53.4 | 37.1 | 50.2 | 54.3 |
| 29. | Pisum_sativum_U81287 | | 55.5 | 72.2 | 73.3 | 46.5 | 67.9 | 55.5 | 38.1 | 68.5 |
| 30. | Populus_trichocarpa_EF148189 | | 38.2 | 51 | 41.5 | 69 | 51.5 | 34.4 | 56.5 | 52.3 |
| 31. | S. bicolor_Sb03g043760.1 | | 56.5 | 78.4 | 70.7 | 47.3 | 72.6 | 58.5 | 37.8 | 73.2 |
| 32. | S. bicolor_Sb08g015580.1 | | 35.6 | 50.4 | 41.2 | 66.4 | 48.8 | 31.6 | 60.5 | 49.6 |
| 33. | Solanum_lycopersicum_BT012756 | | 33.9 | 47.5 | 40.1 | 71.2 | 47.1 | 31.1 | 58.9 | 47.9 |
| 34. | T. aestivum_c54626433@14323 | | 43.4 | 76.6 | 56 | 53.9 | 85.1 | 57.7 | 44.1 | 86.3 |
| 35. | T. aestivum_c55526991@11638 | | 39.3 | 56.6 | 44.3 | 62.9 | 55.3 | 36.5 | 54.5 | 56.6 |
| 36. | T. aestivum_c56257751@11019 | | 43.9 | 77.5 | 56.1 | 52.7 | 83.2 | 56.1 | 43.8 | 84.4 |
| 37. | T. aestivum_TA06MC00270_56599813@270 | | 43.2 | 77.8 | 55.7 | 53.9 | 83.5 | 55.7 | 44.8 | 84.7 |
| 38. | V. vinifera_GSVIVT00016201001 | | 33.2 | 45.1 | 35 | 67.5 | 45.5 | 30 | 65.2 | 45.8 |
| 39. | Z. mays_ZM07MC15190_65293483@15154 | | 34.7 | 50.2 | 41.4 | 65.3 | 47 | 30.7 | 59.5 | 47.8 |
| 40. | Z. mays_ZM07MC16747_65163049@16705 | | 34.8 | 50.6 | 39.3 | 66 | 47.4 | 30.4 | 60.5 | 48.2 |
| 41. | Zea_mays_DQ245645 | | 52.1 | 70.4 | 72.9 | 44.1 | 67.3 | 56.9 | 37.8 | 67.3 |
| 42. | Zea_mays_DQ245844 | | 43.4 | 78.9 | 56.6 | 53.5 | 84.6 | 56.6 | 45.5 | 85.7 |
| 43. | Zea_mays_EU968589 | | 52.3 | 77.8 | 66 | 46.9 | 75 | 55.6 | 39.1 | 75 |
| | | 18 | 19 | 20 | 21 | 22 | 23 | 24 | 25 | 26 |
| 1. | O. sativa_LOC_Os12g31800.1 | 31.6 | 31.2 | 47.2 | 26.8 | 48.1 | 33.2 | 26.5 | 26.4 | 25.5 |
| 2. | A. thaliana_AT4G13850.2 | 61 | 62.8 | 31.4 | 16.6 | 28.6 | 57.6 | 48.8 | 45 | 46.1 |
| 3. | A. thaliana_AT4G13850.3 | 61.7 | 65.5 | 28.9 | 15.2 | 25.8 | 57.4 | 50.6 | 45.8 | 49 |
| 4. | A. thaliana_AT4G13850.4 | 57 | 64.6 | 25.3 | 13.2 | 23 | 51.3 | 49 | 46.5 | 54.1 |
| 5. | Arabidopsis_thaliana_AJ002892 | 62.1 | 64.1 | 30.3 | 16 | 28.4 | 58 | 51.6 | 45.6 | 47 |
| 6. | Arabidopsis_thaliana_AY097374 | 57 | 61 | 29.6 | 13.7 | 23.9 | 57.3 | 47.8 | 46.5 | 51.1 |
| 7. | Arabidopsis_thaliana_BT002197 | 61 | 60.9 | 32.5 | 17.2 | 29.8 | 56.2 | 48.5 | 43 | 44.7 |
| 8. | Arabidopsis_thaliana_BT006315 | 30.5 | 27.5 | 44.4 | 24.6 | 42.5 | 26.5 | 27.6 | 25.8 | 24.3 |
| 9. | B. napus_BN06MC14993_44009177 | 62 | 61.9 | 28.8 | 14.4 | 26.6 | 54.7 | 47.8 | 46.5 | 48.3 |
| 10. | B. napus_BN06MC33239_51481786 | 38.3 | 37.9 | 24.9 | 10.9 | 19.9 | 34.4 | 33.1 | 34.2 | 40.6 |
| 11. | Bambusa_oldhamii_EU076902 | 52.1 | 54 | 35 | 15.6 | 28.1 | 72.6 | 44.7 | 46.7 | 46.4 |
| 12. | E. lagascae_s_el01277_t@402 | 56.4 | 55.9 | 27.1 | 12.6 | 22.7 | 51.3 | 45.2 | 43.2 | 57.6 |
| 13. | G. max_GM06MC37402_su20g11 | 35.5 | 34.1 | 49.3 | 22.9 | 41 | 34.6 | 32.3 | 30.5 | 31.2 |
| 14. | H. vulgare_c63432693hv270303 | 54.1 | 49.7 | 37 | 16.9 | 30.6 | 64.9 | 45.7 | 45.7 | 44.4 |
| 15. | H. vulgare_HV04MC07973_63432693 | 38.4 | 41.1 | 22.8 | 10.3 | 19.1 | 46.5 | 35 | 39.8 | 42.7 |
| 16. | H._vulgare_subsp_vulgare_AK249796 | 25.3 | 26.1 | 43.3 | 28.7 | 61.3 | 28.1 | 25.2 | 24.5 | 23.7 |
| 17. | H._vulgare_subsp_vulgare_AK252775 | 53.5 | 49.7 | 35.9 | 17.3 | 30.9 | 64.9 | 45.7 | 45.7 | 45 |
| 18. | L. usitatissimum_c62280695@9780 | | 59.9 | 32.5 | 14.4 | 27 | 52.8 | 46.6 | 45 | 54.4 |
| 19. | Nicotiana_sylvestris_D28862 | 81.2 | | 30 | 15.7 | 25.2 | 57 | 46.9 | 46.5 | 53.1 |
| 20. | Nicotiana_tabacum_AY048972 | 43 | 42.2 | | 25 | 43.1 | 33.2 | 28.4 | 28.7 | 26.7 |
| 21. | O. sativa_LOC_Os07g41120.1 | 22.8 | 21.4 | 34.5 | | 28 | 14.6 | 14.1 | 14.3 | 14 |
| 22. | O. sativa_LOC_Os10g17454.2 | 35.3 | 35 | 58 | 38.5 | | 26.5 | 23 | 23.5 | 23 |
| 23. | Oryza_sativa_Indica_Group_CT830471 | 75.3 | 74.7 | 41.2 | 22 | 36.3 | | 46.9 | 47.8 | 45.8 |
| 24. | P. patens_167311 | 67.5 | 66.9 | 42.6 | 20.4 | 34.4 | 70.1 | | 51.9 | 42 |
| 25. | P. patens_208328 | 67.1 | 67.7 | 42.2 | 21 | 32.5 | 69 | 72 | | 43.2 |
| 26. | P. trichocarpa_707174 | 72.5 | 66.7 | 37.2 | 19.6 | 30.9 | 64 | 58.6 | 60.6 | |
| 27. | Picea_sitchensis_EF083658 | 73.2 | 72 | 46.6 | 23.8 | 38.8 | 73.2 | 64.3 | 70.1 | 59.9 |
| 28. | Picea_sitchensis_EF086676 | 52.5 | 50.2 | 56.3 | 30.7 | 49.2 | 52 | 49.3 | 48.4 | 44.3 |
| 29. | Pisum_sativum_U81287 | 78.5 | 76.7 | 42.6 | 21.6 | 36.6 | 76 | 65 | 62.6 | 68.5 |
| 30. | Populus_trichocarpa_EF148189 | 48.5 | 46.1 | 65 | 31.9 | 53.9 | 50.2 | 47.7 | 45.6 | 40.7 |
| 31. | S. bicolor_Sb03g043760.1 | 75.8 | 73.5 | 41.2 | 21.6 | 36.3 | 82 | 66.2 | 64.5 | 60.5 |
| 32. | S. bicolor_Sb08g015580.1 | 46.4 | 44 | 63.2 | 34.1 | 59 | 45.6 | 42.4 | 44.4 | 36.8 |
| 33. | Solanum_lycopersicum_BT012756 | 45.9 | 44 | 67.5 | 33.7 | 56.8 | 44.7 | 41.6 | 43.6 | 38.1 |
| 34. | T. aestivum_c54626433@14323 | 66.3 | 61.7 | 45.8 | 24.8 | 41.6 | 72.6 | 64 | 62.3 | 52.6 |
| 35. | T. aestivum_c55526991@11638 | 54.8 | 51.6 | 61.7 | 31.7 | 53.6 | 52.5 | 45.7 | 48.4 | 43.4 |
| 36. | T. aestivum_c56257751@11019 | 65.3 | 60.7 | 45.8 | 24.4 | 41.6 | 73.4 | 63 | 63 | 52 |
| 37. | T. aestivum_TA06MC00270_56599813 | 64.8 | 60.8 | 46.2 | 25 | 42 | 72.7 | 62.5 | 61.9 | 50.6 |
| 38. | V. vinifera_GSVIVT00016201001 | 43 | 40.8 | 76.5 | 37.3 | 64.4 | 42.2 | 40.1 | 39.4 | 36.8 |
| 39. | Z. mays_ZM07MC15190_65293483 | 47 | 43.4 | 61 | 34.7 | 56.5 | 44.2 | 42.6 | 41.4 | 36.7 |
| 40. | Z. mays_ZM07MC16747_65163049 | 47.4 | 44.1 | 64.6 | 34.9 | 59 | 46.2 | 41.3 | 42.9 | 38.5 |
| 41. | Zea_mays_DQ245645 | 81.9 | 78.5 | 41.2 | 21.6 | 36 | 74.7 | 64.3 | 60.6 | 64.6 |
| 42. | Zea_mays_DQ245844 | 65.1 | 62.3 | 46.9 | 25 | 42.3 | 73.7 | 62.9 | 62.9 | 50.9 |
| 43. | Zea_mays_EU968589 | 69.9 | 69.9 | 41.5 | 22.2 | 36.3 | 79.1 | 67.5 | 68.4 | 58.2 |

| | | 27 | 28 | 29 | 30 | 31 | 32 | 33 | 34 |
|---|---|---|---|---|---|---|---|---|---|
| 1. | O. sativa_LOC_Os12g31800.1 | 40.4 | 47.2 | 35 | 46.5 | 32.8 | 69.3 | 46.3 | 35.8 |
| 2. | A. thaliana_AT4G13850.2 | 54.1 | 41.6 | 65.6 | 36.1 | 59 | 38 | 35.8 | 52.5 |
| 3. | A. thaliana_AT4G13850.3 | 54.1 | 38.5 | 66.2 | 33.6 | 59.2 | 34.9 | 33.5 | 49.2 |
| 4. | A. thaliana_AT4G13850.4 | 47.8 | 33.5 | 61 | 29.5 | 55.8 | 31 | 30.4 | 45.2 |
| 5. | Arabidopsis_thaliana_AJ002892 | 57 | 40.3 | 64.9 | 35.5 | 60.4 | 36.5 | 34.2 | 52.5 |
| 6. | Arabidopsis_thaliana_AY097374 | 49.4 | 36.2 | 63 | 30.7 | 53.3 | 31.8 | 31.1 | 49.1 |
| 7. | Arabidopsis_thaliana_BT002197 | 54.9 | 42.6 | 63.5 | 39 | 58.1 | 40 | 38.1 | 54.1 |
| 8. | Arabidopsis_thaliana_BT006315 | 32.4 | 38.3 | 30.4 | 46.3 | 27.2 | 48 | 45.5 | 30.7 |
| 9. | B. napus_BN06MC14993_44009177 | 53.5 | 39.4 | 64.2 | 33.6 | 57.4 | 33.2 | 32.3 | 50.8 |
| 10. | B. napus_BN06MC33239_51481786 | 34.6 | 27 | 41.8 | 28.6 | 35.8 | 25 | 26 | 31.4 |
| 11. | Bambusa_oldhamii_EU076902 | 50.6 | 39.3 | 56.4 | 36.1 | 66.7 | 37.2 | 35 | 65.7 |
| 12. | E. lagascae_s_el01277_t@402 | 43.9 | 30.3 | 58.9 | 27 | 53.7 | 27.1 | 26.7 | 42.3 |
| 13. | G. max_GM06MC37402_su20g11 | 37.5 | 48.8 | 37.1 | 52.8 | 34.4 | 48.7 | 49.8 | 39.1 |
| 14. | H. vulgare_c63432693hv270303 | 54.7 | 42.3 | 56 | 40.1 | 59.5 | 39 | 37.9 | 79.5 |
| 15. | H. vulgare_HV04MC07973_63432693 | 36 | 27.3 | 41.6 | 23.9 | 45.2 | 22 | 22.3 | 54.3 |
| 16. | H._vulgare_subsp_vulgare_AK249796 | 32.5 | 37 | 30.3 | 44.7 | 28.4 | 47 | 42 | 31.7 |
| 17. | H._vulgare_subsp_vulgare_AK252775 | 55.3 | 42.7 | 56 | 40.3 | 60.1 | 39 | 37.9 | 80.8 |
| 18. | L. usitatissimum_c62280695@9780 | 50.6 | 36.8 | 62.4 | 34 | 52.3 | 33.2 | 33.3 | 52 |
| 19. | Nicotiana_sylvestris_D28862 | 54.1 | 36.2 | 60.7 | 33.6 | 57.4 | 33.3 | 31.9 | 47.5 |
| 20. | Nicotiana_tabacum_AY048972 | 35.4 | 42.9 | 33.2 | 48.7 | 31.4 | 47.4 | 49.6 | 35.3 |
| 21. | O. sativa_LOC_Os07g41120.1 | 18.5 | 22.8 | 17.2 | 24 | 16 | 25.6 | 23.5 | 17.7 |
| 22. | O. sativa_LOC_Os10g17454.2 | 29.1 | 38 | 29.5 | 43.6 | 28.7 | 45.5 | 38.4 | 31.5 |
| 23. | Oryza_sativa_Indica_Group_CT830471 | 54.4 | 38.5 | 56.2 | 37.2 | 68.7 | 35.4 | 36.4 | 63.6 |
| 24. | P. patens_167311 | 44.8 | 32.7 | 51.9 | 32.5 | 49.4 | 29.1 | 28.6 | 42.3 |
| 25. | P. patens_208328 | 47.3 | 29.5 | 47.7 | 31.1 | 45.5 | 28.6 | 30.5 | 43.6 |
| 26. | P. trichocarpa_707174 | 42.4 | 32.3 | 54.8 | 30.2 | 47 | 26.6 | 26.7 | 40.7 |
| 27. | Picea_sitchensis_EF083658 | | 45.2 | 53.8 | 38.4 | 55.4 | 41.7 | 35.4 | 51.4 |
| 28. | Picea_sitchensis_EF086676 | 58.4 | | 39.8 | 47.2 | 38.9 | 48.8 | 42.9 | 41 |
| 29. | Pisum_sativum_U81287 | 72 | 53.4 | | 38.6 | 56.8 | 35.5 | 32.9 | 52 |
| 30. | Populus_trichocarpa_EF148189 | 53.5 | 62.2 | 46.5 | | 36.4 | 51 | 51 | 41.3 |
| 31. | S. bicolor_Sb03g043760.1 | 70.1 | 52.5 | 75.5 | 48.5 | | 36.2 | 33.1 | 55.4 |
| 32. | S. bicolor_Sb08g015580.1 | 49.6 | 61.2 | 46.4 | 68.8 | 45.2 | | 50.9 | 38.3 |
| 33. | Solanum_lycopersicum_BT012756 | 49 | 57.2 | 43.6 | 68.1 | 44.4 | 68.9 | | 37.1 |
| 34. | T. aestivum_c54626433@14323 | 68 | 54.3 | 65.7 | 54.8 | 68 | 49.6 | 48.2 | |
| 35. | T. aestivum_c55526991@11638 | 57.5 | 66.5 | 53.4 | 66 | 50.2 | 71.2 | 62.3 | 57.1 |
| 36. | T. aestivum_c56257751@11019 | 69.4 | 55.2 | 65.9 | 54.4 | 69.4 | 50 | 49.4 | 94.3 |
| 37. | T. aestivum_TA06MC00270_56599813 | 68.2 | 55.7 | 64.8 | 54.8 | 68.8 | 50.4 | 50.6 | 95.5 |
| 38. | V. vinifera_GSVIVT00016201001 | 47.7 | 58.8 | 40.8 | 70 | 40.8 | 70.4 | 69.3 | 48 |
| 39. | Z. mays_ZM07MC15190_65293483 | 47.4 | 60.2 | 45 | 64.9 | 43.8 | 90 | 68.5 | 48.6 |
| 40. | Z. mays_ZM07MC16747_65163049 | 50.2 | 61.5 | 47.4 | 67.6 | 44.9 | 89.2 | 71.2 | 51 |
| 41. | Zea_mays_DQ245645 | 69.4 | 50.2 | 84.9 | 44.4 | 72.8 | 44.8 | 41.6 | 64 |
| 42. | Zea_mays_DQ245844 | 68 | 55.2 | 66.3 | 54.4 | 69.1 | 50.8 | 50.2 | 97.1 |
| 43. | Zea_mays_EU968589 | 68.8 | 52.9 | 71.9 | 48.1 | 85.6 | 46 | 44.7 | 69.1 |

| | | 35 | 36 | 37 | 38 | 39 | 40 | 41 | 42 | 43 |
|---|---|---|---|---|---|---|---|---|---|---|
| 1. | O. sativa_LOC_Os12g31800.1 | 59.8 | 38.7 | 39.1 | 55 | 68.6 | 68.6 | 32.2 | 38.1 | 33.2 |
| 2. | A. thaliana_AT4G13850.2 | 39.7 | 53.9 | 53 | 33.8 | 37.2 | 36.9 | 78.6 | 53 | 59.6 |
| 3. | A. thaliana_AT4G13850.3 | 36.4 | 49.7 | 48.9 | 30.6 | 33.6 | 33.7 | 82.8 | 49.2 | 58.8 |
| 4. | A. thaliana_AT4G13850.4 | 32.6 | 45.1 | 43.8 | 28.2 | 30.4 | 30.6 | 73.6 | 44.1 | 54.2 |
| 5. | Arabidopsis_thaliana_AJ002892 | 39.3 | 52 | 51.7 | 32.4 | 36 | 36.4 | 80.8 | 52.2 | 60.8 |
| 6. | Arabidopsis_thaliana_AY097374 | 32.1 | 49.1 | 48.3 | 29 | 30.8 | 29.4 | 71 | 48.6 | 54.9 |
| 7. | Arabidopsis_thaliana_BT002197 | 40.1 | 56.2 | 55.2 | 35.6 | 38.7 | 39.3 | 76.1 | 55.2 | 60.9 |
| 8. | Arabidopsis_thaliana_BT006315 | 43 | 32.7 | 33 | 50.3 | 47.3 | 47.8 | 29.9 | 32.3 | 28.2 |
| 9. | B. napus_BN06MC14993_44009177@14945 | 34.7 | 50.9 | 50 | 30.3 | 33.9 | 33.2 | 86.1 | 50.8 | 58.2 |
| 10. | B. napus_BN06MC33239_51481786@33086 | 27.2 | 32.9 | 32.4 | 28.2 | 24.1 | 23.7 | 34.9 | 32.6 | 34.4 |
| 11. | Bambusa_oldhamii_EU076902 | 38.1 | 64.9 | 63.8 | 32 | 34.1 | 34.3 | 53.7 | 65.3 | 64.8 |
| 12. | E. lagascae_s_el01277_t@402 | 31.5 | 42.8 | 42 | 24.1 | 27.4 | 24.3 | 59.7 | 42.9 | 48.4 |
| 13. | G. max_GM06MC37402_su20g11@36531 | 45.4 | 38.7 | 39.1 | 53.2 | 47.7 | 47.1 | 33.5 | 39.9 | 38.1 |
| 14. | H. vulgare_c63432693hv270303@6212 | 39.2 | 80.5 | 79.7 | 35.3 | 37.2 | 36.4 | 54.4 | 80.1 | 62.4 |
| 15. | H. vulgare_HV04MC07973_63432693@7969 | 24.1 | 54.3 | 53.4 | 21.9 | 20.7 | 21.1 | 40 | 54.3 | 41.9 |
| 16. | Hordeum_vulgare_subsp_vulgare_AK249796 | 39.7 | 33 | 33.7 | 50.3 | 47.4 | 47.7 | 28.1 | 34 | 28.8 |
| 17. | Hordeum_vulgare_subsp_vulgare_AK252775 | 39.5 | 81.6 | 80.8 | 35.7 | 37.2 | 36.4 | 53.5 | 81.4 | 62.9 |
| 18. | L. usitatissimum_c62280695@9780 | 35.3 | 52 | 50.6 | 32.1 | 34 | 33.2 | 63.3 | 50.3 | 51.9 |
| 19. | Nicotiana_sylvestris_D28862 | 36.6 | 46.9 | 46.6 | 30.9 | 33.2 | 32.2 | 64.9 | 46.9 | 53.2 |
| 20. | Nicotiana_tabacum_AY048972 | 44.4 | 36 | 36 | 54.7 | 47.5 | 44.9 | 29.5 | 36.7 | 31.8 |
| 21. | O. sativa_LOC_Os07g41120.1 | 23.1 | 17.7 | 18.3 | 26.8 | 27 | 26.1 | 15 | 18.5 | 15.4 |
| 22. | O. sativa_LOC_Os10g17454.2 | 38.7 | 33.3 | 33.3 | 51.2 | 41.7 | 44.8 | 27.6 | 33 | 29 |
| 23. | Oryza_sativa_Indica_Group_CT830471 | 35.4 | 63 | 62.5 | 31 | 33.7 | 35 | 56.1 | 63.4 | 68 |
| 24. | P. patens_167311 | 30.5 | 43.1 | 42.6 | 28.4 | 28.9 | 26.7 | 49.7 | 42.9 | 47.6 |
| 25. | P. patens_208328 | 30 | 45.3 | 44.5 | 26.2 | 27 | 26.3 | 46.5 | 45.3 | 44.4 |
| 26. | P. trichocarpa_707174 | 30.4 | 42.3 | 41 | 28.2 | 26.1 | 26.9 | 47.6 | 41.2 | 48.7 |
| 27. | Picea_sitchensis_EF083658 | 39.9 | 54.5 | 53.6 | 36.5 | 38.9 | 40.6 | 52.9 | 53.1 | 52.8 |
| 28. | Picea_sitchensis_EF086676 | 45.7 | 42.7 | 43.6 | 46.6 | 47.5 | 45.9 | 38.9 | 43.2 | 40.8 |
| 29. | Pisum_sativum_U81287 | 38.8 | 53.8 | 52.8 | 33.9 | 34.4 | 34.8 | 65.1 | 54.3 | 56.5 |
| 30. | Populus_trichocarpa_EF148189 | 48.6 | 41.7 | 42.1 | 56.4 | 47.3 | 48.5 | 33.2 | 42.5 | 38.2 |
| 31. | S. bicolor_Sb03g043760.1 | 35.4 | 57.2 | 55.4 | 31.4 | 32.9 | 34.6 | 59.9 | 56.3 | 78.6 |
| 32. | S. bicolor_Sb08g015580.1 | 60.1 | 39.4 | 39.6 | 54.9 | 82.7 | 81.3 | 34 | 40.2 | 37.4 |
| 33. | Solanum_lycopersicum_BT012756 | 43.5 | 38.6 | 39.4 | 56.5 | 48.9 | 51.7 | 33.1 | 39 | 35 |
| 34. | T. aestivum_c54626433@14323 | 40.1 | 91.5 | 92.6 | 36.7 | 34.9 | 36.4 | 51.4 | 94.9 | 59.4 |
| 35. | T. aestivum_c55526991@11638 | | 39.7 | 40.1 | 48.7 | 60.2 | 59.4 | 36 | 40.5 | 36.7 |
| 36. | T. aestivum_c56257751@11019 | 56.6 | | 98.3 | 38.2 | 37.1 | 37.5 | 52 | 96 | 60.1 |
| 37. | T. aestivum_TA06MC00270_56599813@270 | 57.1 | 98.3 | | 38.5 | 37.9 | 38.3 | 51.1 | 97.7 | 59.7 |
| 38. | V. vinifera_GSVIVT00016201001 | 64.6 | 49.1 | 49.5 | | 53.4 | 54.3 | 30.6 | 38.5 | 33.9 |
| 39. | Z. mays_ZM07MC15190_65293483@15154 | 72.5 | 49.4 | 50.6 | 67.1 | | 78 | 33.5 | 38.6 | 34.9 |
| 40. | Z. mays_ZM07MC16747_65163049@16705 | 70.9 | 51 | 52.2 | 67.5 | 86.1 | | 31.6 | 38.7 | 35.8 |
| 41. | Zea_mays_DQ245645 | 50.7 | 64.2 | 63.1 | 39 | 44.6 | 44.1 | | 51.4 | 58.8 |
| 42. | Zea_mays_DQ245844 | 57.1 | 97.1 | 98.3 | 49.1 | 51 | 51 | 64 | | 60.6 |
| 43. | Zea_mays_EU968589 | 51.6 | 70.5 | 70.5 | 41.2 | 44.6 | 47 | 69.9 | 70.9 | |

### Example 4

### Identification of Domains Comprised in Polypeptide Sequences Useful in Performing the Methods of the Invention

### 4.1. C3H-Like Polypeptides

[0707] The Integrated Resource of Protein Families, Domains and Sites (InterPro) database is an integrated interface for the commonly used signature databases for text- and sequence-based searches. The InterPro database combines these databases, which use different methodologies and varying degrees of biological information about well-characterized proteins to derive protein signatures. Collaborating databases include SWISS-PROT, PROSITE, TrEMBL, PRINTS, Propom and Pfam, Smart and TIGRFAMs. Pfam is a large collection of multiple sequence alignments and hidden Markov models covering many common protein domains and families. Pfam is hosted at the Sanger Institute server in the United Kingdom. Interpro is hosted at the European Bioinformatics Institute in the United Kingdom.

### 4.2. SPATULA-Like (SPT) Polypeptides

[0708] The Integrated Resource of Protein Families, Domains and Sites (InterPro) database is an integrated interface for the commonly used signature databases for text- and sequence-based searches. The InterPro database combines these databases, which use different methodologies and varying degrees of biological information about well-characterized proteins to derive protein signatures. Collaborating databases include SWISS-PROT, PROSITE, TrEMBL, PRINTS, Propom and Pfam, Smart and TIGRFAMs. Pfam is a large collection of multiple sequence alignments and hidden Markov models covering many common protein domains and families. Pfam is hosted at the Sanger Institute server in the United Kingdom. Interpro is hosted at the European Bioinformatics Institute in the United Kingdom.

[0709] The results of the InterPro scan of the polypeptide sequence of SEQ ID NO: 97 are presented as Table C1 below.

### 4.3. IDI2 (Iron Deficiency Induced 2) Polypeptides

[0710] The Integrated Resource of Protein Families, Domains and Sites (InterPro) database is an integrated interface for the commonly used signature databases for text- and sequence-based searches. The InterPro database combines these databases, which use different methodologies and varying degrees of biological information about well-characterized proteins to derive protein signatures. Collaborating databases include SWISS-PROT, PROSITE, TrEMBL, PRINTS, Propom and Pfam, Smart and TIGRFAMs. Pfam is a large collection of multiple sequence alignments and hidden Markov models covering many common protein domains and families. Pfam is hosted at the Sanger Institute server in the United Kingdom. Interpro is hosted at the European Bioinformatics Institute in the United Kingdom.

[0711] The results of the InterPro scan of the polypeptide sequence as represented by SEQ ID NO: 2 are presented in Table C2.

TABLE C2
InterPro scan results (major accession numbers) of the polypeptide sequence as
represented by SEQ ID NO: 140.

| | | | Amino acid |
|---|---|---|---|
| | | | coordinates on |
| Database | Accession number | Accession name | SEQ ID NO 140 |
| InterPro | IPR000649 | Initiation factor 2B related | |
| HMMPanther | PTHR10233 | TRANSLATION INITIATION FACTOR EIF- | T[28-351] 9.1e−184 |
| | | 2B | |
| HMMPfam | PF01008 | IF-2B | T[48-350] 1.4e−107 |
| InterPro | IPR005251 | Putative translation initiation factor, aIF- | |
| | | 2BI/5-methylthioribose-1-phosphate | |
| | | isomerise | |
| HMMTigr | TIGR00512 | salvage_mtnA: methylthioribose-1-phospha | T[8-350] 5.9e−238 |
| InterPro | IPR011559 | Initiation factor 2B alpha/beta/delta | |
| HMMTigr | TIGR00524 | eIF-2B_rel: eIF-2B alpha/beta/delta-rela | T[34-350] 1.3e−96 |
| InterPro | NULL | NULL | |
| Gene3D | G3DSA:3.40.50.10470 | no description | T[143-350] 2.1e−52 |
| HMMPanther | PTHR10233:SF6 | TRANSLATION INITIATION FACTOR EIF- | T[28-351] 9.1e−184 |
| | | 2B SUBUNIT-RELATED | |
| Superfamily | SSF100950 | NagB/RpiA/CoA transferase-like | T[6-352] 3.2e−108 |

4.4. eIF4F-Like Protein Complex

[0712] The Integrated Resource of Protein Families, Domains and Sites (InterPro) database is an integrated interface for the commonly used signature databases for text- and sequence-based searches. The InterPro database combines these databases, which use different methodologies and varying degrees of biological information about well-characterized proteins to derive protein signatures. Collaborating databases include SWISS-PROT, PROSITE, TrEMBL, PRINTS, Propom and Pfam, Smart and TIGRFAMs. Pfam is a large collection of multiple sequence alignments and hidden Markov models covering many common protein domains and families. Pfam is hosted at the Sanger Institute server in the United Kingdom. Interpro is hosted at the European Bioinformatics Institute in the United Kingdom. Table C3 means anyone or more of Table C3a and C3b.

[0713] The results of the InterPro scan of the eIF4 isoG and eIF4A polypeptide sequences are presented in Table C3.

TABLE C3a
InterPro scan results (major accession numbers) of the polypeptide sequence as
represented by SEQ ID NO: 241 - InterPro motif search of eIF4isoG (Os04g42140)

| Method | Accession | Domain | start | stop | E-value |
|---|---|---|---|---|---|
| HMMPanther | PTHR23253:SF2 | Eukaryotic initiation | 76 | 792 | 0 |
| | | factor 4F-related | | | |
| superfamily | SSF48371 | ARM repeat | 197 | 438 | 8.20e−71 |
| Gene3D | G3DSA1.25.40.180 | no description | 197 | 438 | 8.50e−73 |
| HMMSmart | SM00544 | no description | 628 | 740 | 1.50e−26 |
| HMMPfam | PF02847 | MA3 | 628 | 740 | 4.20e−30 |
| HMMSmart | SM00543 | no description | 208 | 435 | 4.90e−55 |
| HMMPfam | PF02854 | MIF4G | 208 | 435 | 2.40e−67 |

TABLE C3b
InterPro scan results (major accession numbers) of the polypeptide sequence as
represented by SEQ ID NO: 301 - InterPro motif search of eIF4A (Os06g48750)

| Method | Accession | Domain | start | stop | E-value |
|---|---|---|---|---|---|
| superfamily | SSF52540 | SSF52540 | 78 | 414 | 740e−49 |
| superfamily | SSF52540 | SSF52540 | 41 | 424 | 4.40e−58 |
| HMMPanther | PTHR10967:SF2 | PTHR10967:SF2 | 25 | 414 | 0 |
| HMMPanther | PTHR10967 | PTHR10967 | 25 | 414 | 0 |
| Gene3D | G3DSA:3.40.50.300 | G3DSA:3.40.50.300 | 282 | 400 | 6.50e−32 |
| Gene3D | G3DSA:3.40.50.300 | G3DSA:3.40.50.300 | 28 | 252 | 4.00e−69 |
| ProfileScan | PS51192 | Helicase_ATP_bind_1 | 72 | 242 | 0 |
| ProfileScan | PS51195 | Q_motif | 41 | 69 | 0 |
| HMMSmart | SM00487 | DEXDc | 60 | 257 | 2.70e−56 |
| HMMPfam | PF00270 | DEAD | 65 | 231 | 5.30e−59 |
| Profilescan | PS51194 | Helicase_Cter | 253 | 414 | 0 |
| HMMSmart | SM00490 | HELICc | 294 | 375 | 3.60e−31 |
| HMMPfam | PF00271 | Helicase_C | 299 | 375 | 8.60e−30 |
| Profilescan | PS00039 | Dead_ATP_Helicase | 188 | 196 | 8.00e−05 |

### 4.5. GR-RBP (Glycine Rich-RNA Binding Protein) Polypeptides

[0714] The Integrated Resource of Protein Families, Domains and Sites (InterPro) database is an integrated interface for the commonly used signature databases for text- and sequence-based searches. The InterPro database combines these databases, which use different methodologies and varying degrees of biological information about well-characterized proteins to derive protein signatures. Collaborating databases include SWISS-PROT, PROSITE, TrEMBL, PRINTS, Propom and Pfam, Smart and TIGRFAMs. Pfam is a large collection of multiple sequence alignments and hidden Markov models covering many common protein domains and families. Pfam is hosted at the Sanger Institute server in the United Kingdom. Interpro is hosted at the European Bioinformatics Institute in the United Kingdom.

[0715] The results of the InterPro scan of the polypeptide sequence as represented by SEQ ID NO: 827 are presented in Table C4.

TABLE C4
InterPro scan results (major accession numbers) of the polypeptide
sequence as represented by SEQ ID NO: 827.

| | | | Amino acid coordinates |
|---|---|---|---|
| Database | Accession number | Accession name | on SEQ ID NO 2 |
| InterPro | IPR000504 | RNA recognition | |
| | | motif, RNP-1 | |
| HMMPfam | PF00076 | RRM_1 | T[33-104] 5.39E−29 |
| HMMSmart | SM00360 | RRM | T[32-105] 8.50E−30 |
| ProfileScan | PS50102 | RRM | T[31-109] 0.0 |
| InterPro | IPR002952 | Eggshell protein | |
| FPrintScan | PR01228 | EGGSHELL | T[36-47] 1.8E−10 T[116-131] |
| | | | 1.8E−10 T[144-154] 1.8E−10 |
| | | | T[170-188] 1.8E−10 |
| InterPro | IPR012677 | Nucleotide- | |
| | | binding, alpha- | |
| | | beta plait | |
| Gene3D | G3DSA:3.30.70.330a_b_plait_nuc_bd | | T[29-147] 1.10E−32 |
| InterPro | IPR015465 | RNA recognition | |
| | | motif, glycine rich | |
| | | protein | |
| HMMPanther | PTHR10432:SF31 RRM_Gly_rich | | T[31-225] 7.90003079443043E−47 |
| InterPro | NULL | NULL | |
| HMMPanther | PTHR10432 | PTHR10432 | T[31-225] 7.90E−47 T[31-225] |
| | | | 7.90E−47 |
| Superfamily | SSF54928 | SSF54928 | T[9-145] 1.6E−32 |

### Example 5

### Topology Prediction of the Polypeptide Sequences Useful in Performing the Methods of the Invention

### 5.1. C3H-Like Polypeptides

[0716] TargetP 1.1 predicts the subcellular location of eukaryotic proteins. The location assignment is based on the predicted presence of any of the N-terminal pre-sequences: chloroplast transit peptide (cTP), mitochondrial targeting peptide (mTP) or secretory pathway signal peptide (SP). Scores on which the final prediction is based are not really probabilities, and they do not necessarily add to one. However, the location with the highest score is the most likely according to TargetP, and the relationship between the scores (the reliability class) may be an indication of how certain the prediction is. The reliability class (RC) ranges from 1 to 5, where 1 indicates the strongest prediction. TargetP is maintained at the server of the Technical University of Denmark.

[0717] For the sequences predicted to contain an N-terminal presequence a potential cleavage site can also be predicted.

[0718] A number of parameters are selected, such as organism group (non-plant or plant), cutoff sets (none, predefined set of cutoffs, or user-specified set of cutoffs), and the calculation of prediction of cleavage sites (yes or no).

[0719] Many other algorithms can be used to perform such analyses, including:
[0720] ChloroP 1.1 hosted on the server of the Technical University of Denmark;
[0721] Protein Prowler Subcellular Localisation Predictor version 1.2 hosted on the server of the Institute for Molecular Bioscience, University of Queensland, Brisbane, Australia;
[0722] PENCE Proteome Analyst PA-GOSUB 2.5 hosted on the server of the University of Alberta, Edmonton, Alberta, Canada;
[0723] TMHMM, hosted on the server of the Technical University of Denmark
[0724] PSORT (URL: psort.org)
[0725] PLOC (Park and Kanehisa, Bioinformatics, 19, 1656-1663, 2003).

### 5.2. SPATULA-Like (SPT) Polypeptides

[0726] TargetP 1.1 predicts the subcellular location of eukaryotic proteins. The location assignment is based on the predicted presence of any of the N-terminal pre-sequences: chloroplast transit peptide (cTP), mitochondrial targeting peptide (mTP) or secretory pathway signal peptide (SP). Scores on which the final prediction is based are not really probabilities, and they do not necessarily add to one. However, the location with the highest score is the most likely according to TargetP, and the relationship between the scores (the reliability class) may be an indication of how certain the prediction is. The reliability class (RC) ranges from 1 to 5, where 1 indicates the strongest prediction. TargetP is maintained at the server of the Technical University of Denmark.

[0727] For the sequences predicted to contain an N-terminal presequence a potential cleavage site can also be predicted.

[0728] A number of parameters are selected, such as organism group (non-plant or plant), cutoff sets (none, predefined set of cutoffs, or user-specified set of cutoffs), and the calculation of prediction of cleavage sites (yes or no).

[0729] Many other algorithms can be used to perform such analyses, including:
[0730] ChloroP 1.1 hosted on the server of the Technical University of Denmark;
[0731] Protein Prowler Subcellular Localisation Predictor version 1.2 hosted on the server of the Institute for Molecular Bioscience, University of Queensland, Brisbane, Australia;
[0732] PENCE Proteome Analyst PA-GOSUB 2.5 hosted on the server of the University of Alberta, Edmonton, Alberta, Canada;
[0733] TMHMM, hosted on the server of the Technical University of Denmark
[0734] PSORT (URL: psort.org)
[0735] PLOC (Park and Kanehisa, Bioinformatics, 19, 1656-1663, 2003).

### 5.3. IDI2 (Iron Deficiency Induced 2) Polypeptides

[0736] TargetP 1.1 predicts the subcellular location of eukaryotic proteins. The location assignment is based on the predicted presence of any of the N-terminal pre-sequences: chloroplast transit peptide (cTP), mitochondrial targeting peptide (mTP) or secretory pathway signal peptide (SP). Scores on which the final prediction is based are not really probabilities, and they do not necessarily add to one. However, the location with the highest score is the most likely according to TargetP, and the relationship between the scores (the reliability class) may be an indication of how certain the prediction is. The reliability class (RC) ranges from 1 to 5, where 1 indicates the strongest prediction. TargetP is maintained at the server of the Technical University of Denmark.

[0737] For the sequences predicted to contain an N-terminal presequence a potential cleavage site can also be predicted.

[0738] A number of parameters were selected, such as organism group (non-plant or plant), cutoff sets (none, predefined set of cutoffs, or user-specified set of cutoffs), and the calculation of prediction of cleavage sites (yes or no).

[0739] The results of TargetP 1.1 analysis of the polypeptide sequence as represented by SEQ ID NO: 140 are presented Table D1. The “plant” organism group has been selected, no cutoffs defined, and the predicted length of the transit peptide requested. The subcellular localization of the polypeptide sequence as represented by SEQ ID NO: 140 may be the cytoplasm or nucleus, no transit peptide is predicted.

TABLE D1
TargetP 1.1 analysis of the polypeptide sequence as
represented by SEQ ID NO: 140.

| Name | Len | cTP | mTP | SP | other | Loc | RC | TPlen |
|---|---|---|---|---|---|---|---|---|
| SEQ ID NO: 140 | 367 | 0.047 | 0.338 | 0.070 | 0.421 | — | 5 | — |
| cutoff | | 0.000 | 0.000 | 0.000 | 0.000 | | | |

Abbreviations:
Len, Length;
cTP, Chloroplastic transit peptide;
mTP, Mitochondrial transit peptide,
SP, Secretory pathway signal peptide,
other, Other subcellular targeting,
Loc, Predicted Location;
RC, Reliability class;
TPlen, Predicted transit peptide length.

[0740] Many other algorithms can be used to perform such analyses, including:
[0741] ChloroP 1.1 hosted on the server of the Technical University of Denmark;
[0742] Protein Prowler Subcellular Localisation Predictor version 1.2 hosted on the server of the Institute for Molecular Bioscience, University of Queensland, Brisbane, Australia;
[0743] PENCE Proteome Analyst PA-GOSUB 2.5 hosted on the server of the University of Alberta, Edmonton, Alberta, Canada;
[0744] TMHMM, hosted on the server of the Technical University of Denmark
[0745] PSORT (URL: psort.org)
[0746] PLOC (Park and Kanehisa, Bioinformatics, 19, 1656-1663, 2003).
   5.4. eIF4F-Like Protein Complex

[0747] TargetP 1.1 predicts the subcellular location of eukaryotic proteins. The location assignment is based on the predicted presence of any of the N-terminal pre-sequences: chloroplast transit peptide (cTP), mitochondrial targeting peptide (mTP) or secretory pathway signal peptide (SP). Scores on which the final prediction is based are not really probabilities, and they do not necessarily add to one. However, the location with the highest score is the most likely according to TargetP, and the relationship between the scores (the reliability class) may be an indication of how certain the prediction is. The reliability class (RC) ranges from 1 to 5, where 1 indicates the strongest prediction. TargetP is maintained at the server of the Technical University of Denmark.

[0748] For the sequences predicted to contain an N-terminal presequence a potential cleavage site can also be predicted.

[0749] Many other algorithms can be used to perform such analyses, including:
[0750] ChloroP 1.1 hosted on the server of the Technical University of Denmark;
[0751] Protein Prowler Subcellular Localisation Predictor version 1.2 hosted on the server of the Institute for Molecular Bioscience, University of Queensland, Brisbane, Australia;
[0752] PENCE Proteome Analyst PA-GOSUB 2.5 hosted on the server of the University of Alberta, Edmonton, Alberta, Canada;
[0753] TMHMM, hosted on the server of the Technical University of Denmark
[0754] PSORT (URL: psort.org)
[0755] PLOC (Park and Kanehisa, Bioinformatics, 19, 1656-1663, 2003).

### 5.5. GR-RBP (Glycine Rich-RNA Binding Protein) Polypeptides

[0756] TargetP 1.1 predicts the subcellular location of eukaryotic proteins. The location assignment is based on the predicted presence of any of the N-terminal pre-sequences: chloroplast transit peptide (cTP), mitochondrial targeting peptide (mTP) or secretory pathway signal peptide (SP). Scores on which the final prediction is based are not really probabilities, and they do not necessarily add to one. However, the location with the highest score is the most likely according to TargetP, and the relationship between the scores (the reliability class) may be an indication of how certain the prediction is. The reliability class (RC) ranges from 1 to 5, where 1 indicates the strongest prediction. TargetP is maintained at the server of the Technical University of Denmark.

[0757] For the sequences predicted to contain an N-terminal presequence a potential cleavage site can also be predicted.

[0758] A number of parameters were selected, such as organism group (non-plant or plant), cutoff sets (none, predefined set of cutoffs, or user-specified set of cutoffs), and the calculation of prediction of cleavage sites (yes or no).

[0759] The results of TargetP 1.1 analysis of the polypeptide sequence as represented by SEQ ID NO: 2 are presented Table D2. The “plant” organism group has been selected, no cutoffs defined, and the predicted length of the transit peptide requested. The subcellular localization of the polypeptide sequence as represented by SEQ ID NO: 827 is predicted to be the mitochondrion, a transit peptide does not appear to be present.

TABLE D2
TargetP 1.1 analysis of the polypeptide sequence as
represented by SEQ ID NO: 827.

| Name | Len | cTP | mTP | SP | other | Loc | RC | TPlen |
|---|---|---|---|---|---|---|---|---|
| SEQ ID NO: 827 | 258 | 0.282 | 0.582 | 0.035 | 0.058 | M | 4 | 28 |
| cutoff | | 0.000 | 0.000 | 0.000 | 0.000 | | | |

Abbreviations:
Len, Length;
cTP, Chloroplastic transit peptide;
mTP, Mitochondrial transit peptide,
SP, Secretory pathway signal peptide,
other, Other subcellular targeting,
Loc, Predicted Location;
RC, Reliability class;
TPlen, Predicted transit peptide length.

[0760] Many other algorithms can be used to perform such analyses, including:
[0761] ChloroP 1.1 hosted on the server of the Technical University of Denmark;
[0762] Protein Prowler Subcellular Localisation Predictor version 1.2 hosted on the server of the Institute for Molecular Bioscience, University of Queensland, Brisbane, Australia;
[0763] PENCE Proteome Analyst PA-GOSUB 2.5 hosted on the server of the University of Alberta, Edmonton, Alberta, Canada;
[0764] TMHMM, hosted on the server of the Technical University of Denmark
[0765] PSORT (URL: psort.org)
[0766] PLOC (Park and Kanehisa, Bioinformatics, 19, 1656-1663, 2003).

### Example 6

### Assay Related to the Polypeptide Sequences Useful in Performing the Methods of the Invention

### 6.1. IDI2 (Iron Deficiency Induced 2) Polypeptides

[0767] The functionality of eukaryotic initiation factor 2B may be assayed as described by Fabian et al. (1997, 1998). In brief, the baculovirus expression vector system (BEVS) is used to express FLAG epitope tagged alleles for the alpha, beta, gamma, delta, and epsilon subunits of rat eIF2B in Sf21 cells. The eIF2B holoprotein is reconstituted in vivo by coexpression of all five subunits in Sf21 cells and is subsequently purified using a two-step procedure involving an anti-FLAG immunoaffinity column followed by a gel filtration chromatography.

[0768] The purified five-subunit eIF2B complex has high Guanine nucleotide Exchange Factor (GEF) activity as assayed by measuring the exchange of [³H]GDP bound to eIF2 for unlabeled GDP using [³H]GDP-bound to eIF2 as a substrate. The labeled binary complex eIF2-[³H]GDP is prepared by incubating tubes containing rat liver eIF2 [about 95% pure] and [³H]GDP (2.5 mM, 10.9 Ci/mmol) in 80 ml assay buffer (62.5 mM MOPS, pH 7.4, 125 mM KCl, 1.25 mM DTT, 0.2 mg/ml BSA) at 30° C. for 10 min. The Mg²⁺ concentration is adjusted to 2 mM and the binary complex is stored on ice before use. To measure GEF activity, assay buffer containing a 100-fold excess of GDP, purified protein or cell lysate (1.25-40 ml), and 2 mM Mg²⁺ is added to a tube followed by labeled binary complex (1-2 μmol) and the mixture is incubated at 37° C. for 0-12 min. The exchange reaction is measured as a decrease in the eIF2 mediated binding of [³H]GDP to nitrocellulose filters with time.

### 6.2. GR-RBP (Glycine Rich-RNA Binding Protein) Polypeptides

[0769] RNA-binding activity of GR-RBP proteins can be determined as described by Kwak et al. (2005) for GR-RBP4.

[0770] The proteins used for the in vitro nucleic acid binding assay are synthesized by in vitro transcription and translation. The cDNA encoding GR-RBP4 is subcloned into the pET-22b(+) vector (Novagen). The in vitro transcription/translation reaction is performed using the T_{N}T® Quick Coupled Transcription/Translation System with T7 RNA polymerase (Promega). One microgram of DNA is mixed with the reaction mixture containing 40 μl T_{N}T® Quick Master Mix, 2 μl [³⁵S]methionine, and 6 μl nuclease-free water. The reaction mixture is incubated at 30° C. for 90 min. Five microlitres of the in vitro-synthesized protein is mixed with 5 μl of ribohomopolymer-agarose beads or DNA-cellulose beads at a concentration of 1 mg ml⁻¹ in 20 μl of binding buffer (10 mM TRIS-HCl, pH 7.4, 2.5 mM MgCl₂, 0.5% Triton X-100, and 125-1000 mM NaCl) with 1 mg ml⁻¹ heparin. The mixture is incubated on ice for 30 min, and the beads are washed three to four times to remove the unbound-proteins with the binding buffer containing 125-1000 mM NaCl (no heparin). After the last wash, the samples are dried, and resuspended by boiling in 30 μl of SDS loading buffer. The released proteins are separated by SDS-12% PAGE, and the relative intensities of the protein bands are quantified by a Phosphorlmager (Fuji, Japan).

[0771] Binding between the [³⁵S]methionine-labelled GR-RBP4 protein and single-stranded DNA (ssDNA), double-stranded DNA (dsDNA), or homoribopolymers (poly(A), poly(C), poly(G), and poly(U)) are tested at different NaCl concentrations. The GR-RBP4 binds strongly to all DNAs and RNAs tested in the presence of 250 mM NaCl. Binding is also observed at high salt concentrations of 1.0 M NaCl. GR-RBP4 has high affinity to ssDNA and dsDNA as well as RNAs. To verify the specificity of this binding assay further, GR-RBP2 and GR-RBP7 as other members of the GR-RBP family, and luciferase as a negative control, are tested. GR-RBP2 binds most strongly to poly(U) as observed by Vermel et al. (Proc. Natl. Acad. Sci. USA 99, 5866-5871, 2002), and GR-RBP7 shows higher affinity to poly(G), poly(U), and ssDNA as observed in many other GR-RBPs (Ludevid et al., The Plant Journal 2, 999-1003, 1992; Hirose et al., Mol. Gen. Gen. 244, 360-366, 1994). No binding is detected for luciferase that contains neither RRM nor a glycine-rich motif. These observations support the reliability of the binding assay, and indicate that GR-RBP4 binds sequence non-specifically to RNAs and DNAs.

### Example 7

### Cloning of the Nucleic Acid Sequence Used in the Methods of the Invention

### 7.1. C3H-Like Polypeptides

[0772] The nucleic acid sequence used in the methods of the invention was amplified by PCR using as template a Medicago truncatula cDNA library (in pCMV Sport 6.0; Invitrogen, Paisley, UK). PCR was performed using Hifi Taq DNA polymerase in standard conditions, using 200 ng of template in a 50 μl PCR mix. The primers used were prm10911 (SEQ ID NO: 93; sense, start codon in bold): 5′-ggggacaagtttgtacaaaaaagcaggcttaaacaatgaattctgaatc ctcaccc-3′ and prm10912 (SEQ ID NO: 94; reverse, complementary): 5′-ggggaccactttgtacaagaaagctgggtac aatagaatcaatcttccaattc-3′, which include the AttB sites for Gateway recombination. The amplified PCR fragment was purified also using standard methods. The first step of the Gateway procedure, the BP reaction, was then performed, during which the PCR fragment recombined in vivo with the pDONR201 plasmid to produce, according to the Gateway terminology, an “entry clone”, pC3H-like. Plasmid pDONR201 was purchased from Invitrogen, as part of the Gateway® technology.

[0773] The entry clone comprising SEQ ID NO: 1 was then used in an LR reaction with a destination vector used for Oryza sativa transformation. This vector contained as functional elements within the T-DNA borders: a plant selectable marker; a screenable marker expression cassette; and a Gateway cassette intended for LR in vivo recombination with the nucleic acid sequence of interest already cloned in the entry clone. A rice GOS2 promoter (SEQ ID NO: 95) for constitutive specific expression was located upstream of this Gateway cassette.

[0774] After the LR recombination step, the resulting expression vector pGOS2::C3H-like (FIG. 3) was transformed into Agrobacterium strain LBA4044 according to methods well known in the art.

### 7.2. SPATULA-like (SPT) Polypeptides

[0775] The nucleic acid sequence used in the methods of the invention was amplified by PCR using as template a Populus trichocarpa cDNA library. PCR was performed using Hifi Taq DNA polymerase in standard conditions, using 200 ng of template in a 50 μl PCR mix. The primers used were prm11534 (SEQ ID NO: 133; sense, start codon in bold): 5′-ggggacaagtttgta caaaaaagcaggcttaaacaatggaggatctgtacggagc-3′ and prm11535 (SEQ ID NO: 134; reverse, complementary): 5′-ggggaccactttgtacaagaaagctgggttcataactaggccacaccaga-3′, which include the AttB sites for Gateway recombination. The amplified PCR fragment was purified also using standard methods. The first step of the Gateway procedure, the BP reaction, was then performed, during which the PCR fragment recombined in vivo with the pDONR201 plasmid to produce, according to the Gateway terminology, an “entry clone”, pSPT-like. Plasmid pDONR201 was purchased from Invitrogen, as part of the Gateway® technology.

[0776] The entry clone comprising SEQ ID NO: 96 was then used in an LR reaction with a destination vector used for Oryza sativa transformation. This vector contained as functional elements within the T-DNA borders: a plant selectable marker; a screenable marker expression cassette; and a Gateway cassette intended for LR in vivo recombination with the nucleic acid sequence of interest already cloned in the entry clone. A rice GOS2 promoter (SEQ ID NO: 135) for constitutive specific expression was located upstream of this Gateway cassette.

[0777] After the LR recombination step, the resulting expression vector pGOS2::SPT-like (FIG. 6) was transformed into Agrobacterium strain LBA4044 according to methods well known in the art.

### 7.3. IDI2 (Iron Deficiency Induced 2) Polypeptides

[0778] The nucleic acid sequence used in the methods of the invention was amplified by PCR using as template a custom-made Saccharum officinarum seedlings cDNA library (in pCMV Sport 6.0; Invitrogen, Paisley, UK). PCR was performed using Hifi Taq DNA polymerase in standard conditions, using 200 ng of template in a 50 μl PCR mix. The primers used were prm08213 (SEQ ID NO: 147; sense, start codon in bold): 5′-ggggacaagtttgtacaaaaaagcaggctta aacaatggtgggatccgacg-3′ and prm08214 (SEQ ID NO: 148; reverse, complementary): 5′-ggggaccactttgtacaagaaagctgggtgccacgcttgagagtattat t-3′, which include the AttB sites for Gateway recombination. The amplified PCR fragment was purified also using standard methods. The first step of the Gateway procedure, the BP reaction, was then performed, during which the PCR fragment recombined in vivo with the pDONR201 plasmid to produce, according to the Gateway terminology, an “entry clone”, pIDI2. Plasmid pDONR201 was purchased from Invitrogen, as part of the Gateway® technology.

[0779] The entry clone comprising SEQ ID NO: 139 was then used in an LR reaction with a destination vector used for Oryza sativa transformation. This vector contained as functional elements within the T-DNA borders: a plant selectable marker; a screenable marker expression cassette; and a Gateway cassette intended for LR in vivo recombination with the nucleic acid sequence of interest already cloned in the entry clone. A rice GOS2 promoter (SEQ ID NO: 149) for constitutive specific expression was located upstream of this Gateway cassette.

[0780] After the LR recombination step, the resulting expression vector pGOS2::IDI2 (FIG. 9) was transformed into Agrobacterium strain LBA4044 according to methods well known in the art.

7.4. eIF4F-Like Protein Complex

[0781] The nucleic acid sequence used in the methods of the invention was amplified by PCR using as template an Oryza sativa cDNA library (in pCMV Sport 6.0; Invitrogen, Paisley, UK). PCR was performed using Hifi Taq DNA polymerase in standard conditions, using 200 ng of template in a 50 μl PCR mix. The primers used were:

For SEQ. ID. NO 240
primer 1 (SEQ ID NO: 810);
(fwd) 5′-ggggacaagtttgtacaaaaaagcaggcttaaacaatggagaaggatcaccag-3′
and
primer 2 (SEQ ID NO: 811):
(rev) 5′-ggggaccactttgtacaagaaagctgggtttatttcagaagtttgttgca-3′,
For SEQ. ID. NO 300
primer 3 (SEQ ID NO: 812);
(fwd) 5′-ggggacaagtttgtacaaaaaagcaggcttaaacaatggcgggaatggca-3′
and
primer 4 (SEQ ID NO: 813):
(rev) 5′-ggggaccactttgtacaagaaagctgggttcaggccccttaacataactc-3′,

which include the AttB sites for Gateway recombination. The amplified PCR fragment was purified also using standard methods. The first step of the Gateway procedure, the BP reaction, was then performed, during which the PCR fragment recombined in vivo with the pDONR201 plasmid to produce, according to the Gateway terminology, an “entry clone”, peIF4 isoG and peIF4A. Plasmid pDONR201 was purchased from Invitrogen, as part of the Gateway® technology.

[0782] The entry clone comprising SEQ ID NO: 240 and SEQ ID NO: 300 were then used in an LR reaction with a destination vector used for Oryza sativa transformation. This vector contained as functional elements within the T-DNA borders: a plant selectable marker; a screenable marker expression cassette; and a Gateway cassette intended for LR in vivo recombination with the nucleic acid sequence of interest already cloned in the entry clone. A rice GOS2 promoter (SEQ ID NO: 818) for constitutive specific expression was located upstream of this Gateway cassette.

[0783] After the LR recombination step, the resulting expression vectors pGOS2::eIF4F4 isoG and pGOS2::eIF4F4A (FIG. 15) were transformed into Agrobacterium strain LBA4044 according to methods well known in the art.

### 7.5. GR-RBP (Glycine Rich-RNA Binding Protein) Polypeptides

[0784] The nucleic acid sequence used in the methods of the invention was amplified by PCR using as template a custom-made Oryza sativa seedlings cDNA library (in pCMV Sport 6.0; Invitrogen, Paisley, UK). PCR was performed using Hifi Taq DNA polymerase in standard conditions, using 200 ng of template in a 50 μl PCR mix. The primers used were prm10480 (SEQ ID NO: 838; sense, start codon in bold): 5′-ggggacaagtttgtacaaaaaagcag gcttaaacaatggcgttggctaataagatt-3′ and prm10481 (SEQ ID NO: 838; reverse, complementary): 5′-ggggaccactttgtacaagaaagctgggtaggctcgaaggacgtagatta-3′, which include the AttB sites for Gateway recombination. The amplified PCR fragment was purified also using standard methods. The first step of the Gateway procedure, the BP reaction, was then performed, during which the PCR fragment recombined in vivo with the pDONR201 plasmid to produce, according to the Gateway terminology, an “entry clone”, pGR-RBP. Plasmid pDONR201 was purchased from Invitrogen, as part of the Gateway® technology.

[0785] The entry clone comprising SEQ ID NO: 826 was then used in an LR reaction with a destination vector used for Oryza sativa transformation. This vector contained as functional elements within the T-DNA borders: a plant selectable marker; a screenable marker expression cassette; and a Gateway cassette intended for LR in vivo recombination with the nucleic acid sequence of interest already cloned in the entry clone. A rice GOS2 promoter (SEQ ID NO: 840) for constitutive expression was located upstream of this Gateway cassette.

[0786] After the LR recombination step, the resulting expression vector pGOS2::GR-RBP (FIG. 19) was transformed into Agrobacterium strain LBA4044 according to methods well known in the art.

### Example 8

### Plant Transformation

### Rice Transformation

[0787] The Agrobacterium containing the expression vector was used to transform Oryza sativa plants. Mature dry seeds of the rice japonica cultivar Nipponbare were dehusked. Sterilization was carried out by incubating for one minute in 70% ethanol, followed by 30 minutes in 0.2% HgCl₂, followed by a 6 times 15 minutes wash with sterile distilled water. The sterile seeds were then germinated on a medium containing 2,4-D (callus induction medium). After incubation in the dark for four weeks, embryogenic, scutellum-derived calli were excised and propagated on the same medium. After two weeks, the calli were multiplied or propagated by subculture on the same medium for another 2 weeks. Embryogenic callus pieces were sub-cultured on fresh medium 3 days before co-cultivation (to boost cell division activity).

[0788] Agrobacterium strain LBA4404 containing the expression vector was used for co-cultivation. Agrobacterium was inoculated on AB medium with the appropriate antibiotics and cultured for 3 days at 28° C. The bacteria were then collected and suspended in liquid co-cultivation medium to a density (OD₆₀₀) of about 1. The suspension was then transferred to a Petri dish and the calli immersed in the suspension for 15 minutes. The callus tissues were then blotted dry on a filter paper and transferred to solidified, co-cultivation medium and incubated for 3 days in the dark at 25° C. Co-cultivated calli were grown on 2,4-D-containing medium for 4 weeks in the dark at 28° C. in the presence of a selection agent. During this period, rapidly growing resistant callus islands developed. After transfer of this material to a regeneration medium and incubation in the light, the embryogenic potential was released and shoots developed in the next four to five weeks. Shoots were excised from the calli and incubated for 2 to 3 weeks on an auxin-containing medium from which they were transferred to soil. Hardened shoots were grown under high humidity and short days in a greenhouse.

[0789] Approximately 35 independent TO rice transformants were generated for one construct. The primary transformants were transferred from a tissue culture chamber to a greenhouse. After a quantitative PCR analysis to verify copy number of the T-DNA insert, only single copy transgenic plants that exhibit tolerance to the selection agent were kept for harvest of T1 seed. Seeds were then harvested three to five months after transplanting. The method yielded single locus transformants at a rate of over 50% (Aldemita and Hodges1996, Chan et al. 1993, Hiei et al. 1994).

### Example 9

### Transformation of Other Crops

### Corn Transformation

[0790] Transformation of maize (Zea mays) is performed with a modification of the method described by Ishida et al. (1996) Nature Biotech 14(6): 745-50. Transformation is genotype-dependent in corn and only specific genotypes are amenable to transformation and regeneration. The inbred line A188 (University of Minnesota) or hybrids with A188 as a parent are good sources of donor material for transformation, but other genotypes can be used successfully as well. Ears are harvested from corn plant approximately 11 days after pollination (DAP) when the length of the immature embryo is about 1 to 1.2 mm. Immature embryos are cocultivated with Agrobacterium tumefaciens containing the expression vector, and transgenic plants are recovered through organogenesis. Excised embryos are grown on callus induction medium, then maize regeneration medium, containing the selection agent (for example imidazolinone but various selection markers can be used). The Petri plates are incubated in the light at 25° C. for 2-3 weeks, or until shoots develop. The green shoots are transferred from each embryo to maize rooting medium and incubated at 25° C. for 2-3 weeks, until roots develop. The rooted shoots are transplanted to soil in the greenhouse. T1 seeds are produced from plants that exhibit tolerance to the selection agent and that contain a single copy of the T-DNA insert.

### Wheat Transformation

[0791] Transformation of wheat is performed with the method described by Ishida et al. (1996) Nature Biotech 14(6): 745-50. The cultivar Bobwhite (available from CIMMYT, Mexico) is commonly used in transformation. Immature embryos are co-cultivated with Agrobacterium tumefaciens containing the expression vector, and transgenic plants are recovered through organogenesis. After incubation with Agrobacterium, the embryos are grown in vitro on callus induction medium, then regeneration medium, containing the selection agent (for example imidazolinone but various selection markers can be used). The Petri plates are incubated in the light at 25° C. for 2-3 weeks, or until shoots develop. The green shoots are transferred from each embryo to rooting medium and incubated at 25° C. for 2-3 weeks, until roots develop. The rooted shoots are transplanted to soil in the greenhouse. T1 seeds are produced from plants that exhibit tolerance to the selection agent and that contain a single copy of the T-DNA insert.

### Soybean Transformation

[0792] Soybean is transformed according to a modification of the method described in the Texas A&M patent U.S. Pat. No. 5,164,310. Several commercial soybean varieties are amenable to transformation by this method. The cultivar Jack (available from the Illinois Seed foundation) is commonly used for transformation. Soybean seeds are sterilised for in vitro sowing. The hypocotyl, the radicle and one cotyledon are excised from seven-day old young seedlings. The epicotyl and the remaining cotyledon are further grown to develop axillary nodes. These axillary nodes are excised and incubated with Agrobacterium tumefaciens containing the expression vector. After the cocultivation treatment, the explants are washed and transferred to selection media. Regenerated shoots are excised and placed on a shoot elongation medium. Shoots no longer than 1 cm are placed on rooting medium until roots develop. The rooted shoots are transplanted to soil in the greenhouse. T1 seeds are produced from plants that exhibit tolerance to the selection agent and that contain a single copy of the T-DNA insert.

### Rapeseed/Canola Transformation

[0793] Cotyledonary petioles and hypocotyls of 5-6 day old young seedling are used as explants for tissue culture and transformed according to Babic et al. (1998, Plant Cell Rep 17: 183-188). The commercial cultivar Westar (Agriculture Canada) is the standard variety used for transformation, but other varieties can also be used. Canola seeds are surface-sterilized for in vitro sowing. The cotyledon petiole explants with the cotyledon attached are excised from the in vitro seedlings, and inoculated with Agrobacterium (containing the expression vector) by dipping the cut end of the petiole explant into the bacterial suspension. The explants are then cultured for 2 days on MSBAP-3 medium containing 3 mg/l BAP, 3% sucrose, 0.7% Phytagar at 23° C., 16 hr light. After two days of co-cultivation with Agrobacterium, the petiole explants are transferred to MSBAP-3 medium containing 3 mg/l BAP, cefotaxime, carbenicillin, or timentin (300 mg/l) for 7 days, and then cultured on MSBAP-3 medium with cefotaxime, carbenicillin, or timentin and selection agent until shoot regeneration. When the shoots are 5-10 mm in length, they are cut and transferred to shoot elongation medium (MSBAP-0.5, containing 0.5 mg/l BAP). Shoots of about 2 cm in length are transferred to the rooting medium (MSO) for root induction. The rooted shoots are transplanted to soil in the greenhouse. T1 seeds are produced from plants that exhibit tolerance to the selection agent and that contain a single copy of the T-DNA insert.

### Alfalfa Transformation

[0794] A regenerating clone of alfalfa (Medicago sativa) is transformed using the method of (McKersie et al., 1999 Plant Physiol 119: 839-847). Regeneration and transformation of alfalfa is genotype dependent and therefore a regenerating plant is required. Methods to obtain regenerating plants have been described. For example, these can be selected from the cultivar Rangelander (Agriculture Canada) or any other commercial alfalfa variety as described by Brown DCW and A Atanassov (1985. Plant Cell Tissue Organ Culture 4: 111-112). Alternatively, the RA3 variety (University of Wisconsin) has been selected for use in tissue culture (Walker et al., 1978 Am J Bot 65:654-659). Petiole explants are cocultivated with an overnight culture of Agrobacterium tumefaciens C58C1 pMP90 (McKersie et al., 1999 Plant Physiol 119: 839-847) or LBA4404 containing the expression vector. The explants are cocultivated for 3 d in the dark on SH induction medium containing 288 mg/L Pro, 53 mg/L thioproline, 4.35 g/L K2SO4, and 100 μm acetosyringinone. The explants are washed in half-strength Murashige-Skoog medium (Murashige and Skoog, 1962) and plated on the same SH induction medium without acetosyringinone but with a suitable selection agent and suitable antibiotic to inhibit Agrobacterium growth. After several weeks, somatic embryos are transferred to BOi2Y development medium containing no growth regulators, no antibiotics, and 50 g/L sucrose. Somatic embryos are subsequently germinated on half-strength Murashige-Skoog medium. Rooted seedlings were transplanted into pots and grown in a greenhouse. T1 seeds are produced from plants that exhibit tolerance to the selection agent and that contain a single copy of the T-DNA insert.

### Cotton Transformation

[0795] Cotton is transformed using Agrobacterium tumefaciens according to the method described in U.S. Pat. No. 5,159,135. Cotton seeds are surface sterilised in 3% sodium hypochlorite solution during 20 minutes and washed in distilled water with 500 μg/ml cefotaxime. The seeds are then transferred to SH-medium with 50 μg/ml benomyl for germination. Hypocotyls of 4 to 6 days old seedlings are removed, cut into 0.5 cm pieces and are placed on 0.8% agar. An Agrobacterium suspension (approx. 108 cells per ml, diluted from an overnight culture transformed with the gene of interest and suitable selection markers) is used for inoculation of the hypocotyl explants. After 3 days at room temperature and lighting, the tissues are transferred to a solid medium (1.6 g/l Gelrite) with Murashige and Skoog salts with B5 vitamins (Gamborg et al., Exp. Cell Res. 50:151-158 (1968)), 0.1 mg/l 2,4-D, 0.1 mg/l 6-furfurylaminopurine and 750 μg/ml MgCL2, and with 50 to 100 μg/ml cefotaxime and 400-500 μg/ml carbenicillin to kill residual bacteria. Individual cell lines are isolated after two to three months (with subcultures every four to six weeks) and are further cultivated on selective medium for tissue amplification (30° C., 16 hr photoperiod). Transformed tissues are subsequently further cultivated on non-selective medium during 2 to 3 months to give rise to somatic embryos. Healthy looking embryos of at least 4 mm length are transferred to tubes with SH medium in fine vermiculite, supplemented with 0.1 mg/l indole acetic acid, 6 furfurylaminopurine and gibberellic acid. The embryos are cultivated at 30° C. with a photoperiod of 16 hrs, and plantlets at the 2 to 3 leaf stage are transferred to pots with vermiculite and nutrients. The plants are hardened and subsequently moved to the greenhouse for further cultivation.

### Example 10

### Phenotypic Evaluation Procedure

### 10.1 Evaluation Setup

[0796] Approximately 35 independent TO rice transformants were generated. The primary transformants were transferred from a tissue culture chamber to a greenhouse for growing and harvest of T1 seed. Six events, of which the T1 progeny segregated 3:1 for presence/absence of the transgene, were retained. For each of these events, approximately 10 T1 seedlings containing the transgene (hetero- and homo-zygotes) and approximately 10 T1 seedlings lacking the transgene (nullizygotes) were selected by monitoring visual marker expression. The transgenic plants and the corresponding nullizygotes were grown side-by-side at random positions. Greenhouse conditions were of shorts days (12 hours light), 28° C. in the light and 22° C. in the dark, and a relative humidity of 70%. Plants grown under non-stress conditions were watered at regular intervals to ensure that water and nutrients were not limiting and to satisfy plant needs to complete growth and development.

[0797] Three to four T1 events were further evaluated in the T2 generation following the same evaluation procedure as for the T1 generation but with more individuals per event. From the stage of sowing until the stage of maturity the plants were passed several times through a digital imaging cabinet. At each time point digital images (2048×1536 pixels, 16 million colours) were taken of each plant from at least 6 different angles.

### Drought Screen (C3H-Like Polypeptides)

[0798] Plants from T2 seeds were grown in potting soil under normal conditions until they approached the heading stage. They were then transferred to a “dry” section where irrigation was withheld. Humidity probes were inserted in randomly chosen pots to monitor the soil water content (SWC). When SWC fell below certain thresholds, the plants were automatically re-watered continuously until a normal level was reached again. The plants were then re-transferred to normal conditions. The rest of the cultivation (plant maturation, seed harvest) was the same as for plants not grown under abiotic stress conditions. Growth and yield parameters were recorded as detailed for growth under normal conditions.

### Nitrogen Use Efficiency Screen (IDI2 Polypeptides)

[0799] Rice plants from T2 seeds were grown in potting soil under normal conditions except for the nutrient solution. The pots were watered from transplantation to maturation with a specific nutrient solution containing reduced N nitrogen (N) content, usually between 7 to 8 times less. The rest of the cultivation (plant maturation, seed harvest) was the same as for plants not grown under abiotic stress. Growth and yield parameters were recorded as detailed for growth under normal conditions.

### Salt Stress Screen

[0800] Plants are grown on a substrate made of coco fibers and argex (3 to 1 ratio). A normal nutrient solution is used during the first two weeks after transplanting the plantlets in the greenhouse. After the first two weeks, 25 mM of salt (NaCl) is added to the nutrient solution, until the plants are harvested. Seed-related parameters are then measured.

### 10.2 Statistical Analysis: F Test

[0801] A two factor ANOVA (analysis of variants) was used as a statistical model for the overall evaluation of plant phenotypic characteristics. An F test was carried out on all the parameters measured of all the plants of all the events transformed with the gene of the present invention. The F test was carried out to check for an effect of the gene over all the transformation events and to verify for an overall effect of the gene, also known as a global gene effect. The threshold for significance for a true global gene effect was set at a 5% probability level for the F test. A significant F test value points to a gene effect, meaning that it is not only the mere presence or position of the gene that is causing the differences in phenotype.

[0802] Because two experiments with overlapping events were carried out, a combined analysis was performed. This is useful to check consistency of the effects over the two experiments, and if this is the case, to accumulate evidence from both experiments in order to increase confidence in the conclusion. The method used was a mixed-model approach that takes into account the multilevel structure of the data (i.e. experiment—event—segregants). P values were obtained by comparing likelihood ratio test to chi square distributions.

### 10.3 Parameters Measured

### Biomass-Related Parameter Measurement

[0803] From the stage of sowing until the stage of maturity the plants were passed several times through a digital imaging cabinet. At each time point digital images (2048×1536 pixels, 16 million colours) were taken of each plant from at least 6 different angles.

[0804] The plant aboveground area (or leafy biomass) was determined by counting the total number of pixels on the digital images from aboveground plant parts discriminated from the background. This value was averaged for the pictures taken on the same time point from the different angles and was converted to a physical surface value expressed in square mm by calibration. Experiments show that the aboveground plant area measured this way correlates with the biomass of plant parts above ground. The above ground area is the area measured at the time point at which the plant had reached its maximal leafy biomass. The early vigour is the plant (seedling) aboveground area three weeks post-germination. Increase in root biomass is expressed as an increase in total root biomass (measured as maximum biomass of roots observed during the lifespan of a plant); or as an increase in the root/shoot index (measured as the ratio between root mass and shoot mass in the period of active growth of root and shoot).

[0805] Early vigour was determined by counting the total number of pixels from aboveground plant parts discriminated from the background. This value was averaged for the pictures taken on the same time point from different angles and was converted to a physical surface value expressed in square mm by calibration. The results described below are for plants three weeks post-germination.

### Seed-Related Parameter Measurements

[0806] The mature primary panicles were harvested, counted, bagged, barcode-labelled and then dried for three days in an oven at 37° C. The panicles were then threshed and all the seeds were collected and counted. The filled husks were separated from the empty ones using an air-blowing device. The empty husks were discarded and the remaining fraction was counted again. The filled husks were weighed on an analytical balance. The number of filled seeds was determined by counting the number of filled husks that remained after the separation step. The total seed yield was measured by weighing all filled husks harvested from a plant. Total seed number per plant was measured by counting the number of husks harvested from a plant. Thousand Kernel Weight (TKW) is extrapolated from the number of filled seeds counted and their total weight. The Harvest Index (HI) in the present invention is defined as the ratio between the total seed yield and the above ground area (mm²), multiplied by a factor 10⁶. The total number of flowers per panicle as defined in the present invention is the ratio between the total number of seeds and the number of mature primary panicles. The seed fill rate as defined in the present invention is the proportion (expressed as a %) of the number of filled seeds over the total number of seeds (or florets).

### Example 11

### Phenotypic Evaluation Procedure

### 11.1. C3H-Like Polypeptides (Drought Stress)

[0807] The following parameters were significantly increased in either the T1, T2 or both generations with a p-value from the F-test of <0.05. The % difference between the transgenic plants compared to corresponding nullizygotes is also given.
[0808] Above ground biomass: 7%
[0809] Root/shoot index: −9.6 (meaning that there are fewer roots than shoots)
[0810] Number of thick roots: 5%
[0811] Total weight of seeds: at least 17% (more in the T2 generation)
[0812] Number of filled seeds: at least 20.3% (more in the T2 generation)
[0813] Fill rate: at least 16.2% (more in the T2 generation)
[0814] Harvest index: 42.7%
[0815] Number of first panicles: 8.9%

[0816] A positive tendency was also observed for the following parameters in some individual lines: emergence vigour, root biomass, increased number of thin roots, number of total seeds, increased plant height, each relative to corresponding nullizygotes.

### 11.2. SPATULA-Like (SPT) Polypeptides

[0817] The results of the evaluation of transgenic rice plants in the T1 and T2 generations showed a significant increase in Thousand Kernel Weight (TKW) compared to corresponding nullizygotes. There was also a positive tendency towards biomass increase, increased plant height and an increase in the total weight of seeds.

### 11.3. IDI2 (Iron Deficiency Induced 2) Polypeptides (Nitrogen-Limiting Conditions)

[0818] Plants were evaluated in both T1 and T2 generation. When grown under nitrogen-limiting conditions, the transgenic plants had an increase in the number of filled seeds, harvest index and in the total weight of seeds; details are given in Table E1 below:

TABLE E1
Data summary for transgenic rice plants; for each parameter, the
overall percent increase is shown for the T1 generation and the
confirmation (T2 generation), for each parameter the p-value is <0.05.

| Parameter | Overall increase in T1 | Overall increase in T2 |
|---|---|---|
| total weight seeds | 37.5% | 19.0% |
| number filled seeds | 36.8% | 16.6% |
| harvest index | 6.0% | 13.5% |

[0819] In addition, plants expressing an IDI2 nucleic acid also showed increased biomass (above ground and root biomass), increased early vigour, and an increased total number of seeds, compared to the control plants.

11.4. eIF4F-Like Protein Complex

[0820] The results of the evaluation of transgenic rice plants in the T2 generation and expressing a nucleic acid comprising the longest Open Reading Frame in SEQ ID NO: 240 under non-stress conditions are presented below in Table E2. See previous Examples for details on the generations of the transgenic plants. An increase of (at least—more than) 5% was observed for number of flowers per panicle and maximum root thickness.

TABLE E2
results for T2 transgenic rice plants expressing SEQ ID NO: 240

| Parameter | Overall |
|---|---|
| flowers per panicles | 9.7 |
| Root Thick Max | 7.6 |

[0821] The results of the evaluation of transgenic rice plants in the T1 generation and expressing a nucleic acid comprising the longest Open Reading Frame in SEQ ID NO: 300 under non-stress conditions are presented below. See previous Examples for details on the generations of the transgenic plants. An increase of (at least—more than) 5% was observed for fill rate, harvest index and maximum root thickness.

TABLE E3
results for T1 transgenic rice plants expressing SEQ ID NO: 300

| Parameter | Overall |
|---|---|
| fill rate | 5.7 |
| harvest index | 7.5 |
| Root Thick Max | 6.9 |

### 11.5. GR-RBP (Glycine Rich-RNA Binding Protein) Polypeptides (Drought Stress)

[0822] Plants were evaluated in both T1 and T2 generation. When grown under drought-stress conditions, the transgenic plants had an increase in early vigour and showed an increase in biomass (above ground and roots) and seed yield; details are given in Table E4 below:

TABLE E4
Data summary for transgenic rice plants of the T1 generation; for
each parameter, the overall percent increase is shown, and for
each parameter the p-value is <0.05.

| Parameter | Overall |
|---|---|
| Area Max | 7.0 |
| EmerVigor | 14.3 |
| total weight seeds | 51.5 |
| fill rate | 63.5 |
| harvest index | 45.2 |
| number filled seeds | 51.1 |
| Root Thick Max | 12.2 |

[0823] Yield increase and early vigour were again observed in the T2 generation.

[0824] Furthermore, when grown under non-stress conditions, an increase was observed in T1 plants for above-ground biomass, fillrate (each more than 5%) and Thousand Kernel Weight (2.2%).

1-124. (canceled)

125. A method for enhancing a yield-related trait in a plant relative to a corresponding control plant, comprising:
(a) modulating expression in a plant of a nucleic acid encoding a C3H-like polypeptide, wherein said C3H-like polypeptide comprises Domain 4 and any one or more of Domains 1, 2, 3 and 5 defined as follows:

| | |
|---|---|
| (i) Domain 1: | C-X₂-C-X₁₂₋₂₃-C-X₂-C-X₂-G-F; |

wherein X is any amino acid and the underlined residues are conserved,

| | |
|---|---|
| (ii) Domain 2: | Y-X₇₋₁₂-L-X₃-P-X₁₀-G; |

wherein X is any amino acid and the underlined residues are conserved,

| | |
|---|---|
| (iii) Domain 3: | S-K-X₆-P; |

wherein X is any amino acid and the underlined residues are conserved,

| | |
|---|---|
| (iv) Domain 4: | RING-C3H2C3 type; |
| and | |
| (v) Domain 5: | DUF1117; |

(b) modulating expression in a plant of a nucleic acid encoding an SPT-like polypeptide comprising each of the following motifs from N-terminus to C-terminus:
(i) Motif I: an amphipathic helix comprising EEISTFLHQLLH, or a motif having at least 60% sequence identity to Motif I;
(ii) Motif II: an acidic domain comprising DLGDFSCDSEK or a motif having at least 60% sequence identity to Motif II; and
(iii) Motif III: a bHLH domain comprising; AAEVHNLSEKRRRSRINEKMKALQNLIPNSNKT DKASMLDEAIEYLKQL or a motif having at least 60% sequence identity to Motif III;
(c) modulating expression in a plant of a nucleic acid encoding an IDI2 polypeptide, wherein said IDI2 polypeptide comprises an IF-2B domain;
(d) modulating the activity in a plant of an eIF4F-like protein complex by modulating and expressing its subunit polypeptides and/or isoforms thereof, and/or by modulating the level of the eIF4F-like protein complex in the plant, wherein said eIF4F-like protein complex comprises the subunits eIF4G, eIF4A, and eIF4E, or isoforms thereof, comprising respectively the following CC domains with the PFam accession numbers:
(i) for eIF4G polypeptides: MA3 (PFam accession number: PF02847) and MIF4G (PFam accession number: PF02854);
(ii) for eIF4A polypeptides: DEAD (PFam accession number: PF00270) and Helicase_C(PFam accession number: PF00271); and
(iii) for eIF4E polypeptydes: IF4E (PFam accession number: PF01652);
or
(e) modulating expression in a plant of a nucleic acid encoding a Glycine-Rich RNA Binding Protein (GR-RBP polypeptide), wherein said GR-RBP polypeptide comprises an RNA Recognition Motif 1 (PFam accession PF00076, RRM 1).

126. The method of claim 125, wherein
(a) the Domain 1 of the C3H-like polypeptide is: CYSCTRFINLSDHTL----------IVCPHCDNGF, or a domain comprising the underlined conserved residues and having at least 60% sequence identity to the non-underlined residues in the Domain 1, wherein “-” is a gap or any residue;
(b) the Domain 2 of the C3H-like polypeptide is: YDDGDG-----SGLRPLPPTVSEFLLGSG, or a domain comprising the underlined conserved residues and having at least 60% sequence identity to the non-underlined residues in the Domain2, wherein “-” is a gap or any residue;
(c) the Domain 3 of the C3H-like polypeptide is: SKAAIESMP, or a domain comprising the underlined conserved residues and having at least 60% sequence identity to the non-underlined residues in the Domain3;
(d) the Domain 4 of the C3H-like polypeptide is: CAVCKEEFELHAEARELPCKHLYHSDCILPWLTVRNSCPVCR, or a domain comprising the underlined conserved residues and having at least 60% sequence identity to the non-underlined residues in the Domain 4;
(e) the Domain 5 of the C3H-like polypeptide is: GLTIWRLPGGGFAVGRFSGGRSA-GESHFPVVYTEMDGGLN, or a domain having at least 60% sequence identity to the Domain 5, wherein “-” is a gap or any residue;
(f) the SPT-like polypeptide further comprises one or more serine-rich regions;
(g) the bHLH domain of the SPT-like polypeptide further comprises one or more nuclear localisation signals (NLS);
(h) the SPT-like polypeptide comprises a beta strand adjacent to the bHLH domain nearest the C-terminal region, wherein the beta strand comprises QLQVQMLTM;
(i) the IDI2 polypeptide comprises one or more of the motifs of SEQ ID NO: 141 to SEQ ID NO: 146;
(j) the eIF4G subunit polypeptide of the eIF4F-like protein complex comprises a CC domain comprising the amino acid sequence of SEQ ID NO: 240, and/or a sequence having at least 50% sequence identity to the eIF4G polypeptide of SEQ ID NO: 241;
(k) the eIF4G subunit polypeptide of the eIF4F-like protein complex comprises the following motifs:
Motif 7: KAV[LF]EPTFCPMYA[QL]LCSDLNEKLP[PS]FPS[ED]EPGGKEITF KRVLLN[NI]CQEAF or a motif having at least 50% sequence identity to Motif 7,
Motif 8: CP[AE]EENVEAIC[QH]FFNTIGKQLDE[SN]PKSRRIND[MVT]YF [SIN][RQ]LKEL[TS][TS]NPQLAPR or a motif having at least 50% sequence identity to Motif 8,
Motif 9: T[AG]P[DE]QE[ML]ERRDKERLVKLRTLGNIRLIGELLKQKMV PEKIVHHIVQEL LG or a motif having at least 50% sequence identity to Motif 9,
or
Motif 10: TPQNF[ED][KR]LFEQVKAVNIDN[AV]VTL[TN]GVISQIF[DE]K ALMEPTFCEMYANFCFH or a motif having at least 50% sequence identity to Motif 10,
Motif 11: IGELYKK[RK]MLTERIMHECIKKLLGQYQ[DN]PDEE[DN][IV]E [AS]LCKLMSTIGEMIDH or a motif having at least 50% sequence identity to Motif 11,
Motif 12: LSNN[MQ][KN]LS SRVRFMLKD[ASV]IDLRKNKWQQRRKVEG PKKIEEVHRDAAQERQ or a motif having at least 50% sequence identity to Motif 12;
(o) the eIF4G subunit polypeptide of the eIF4F-like protein complex is an eIF4 isoG polypeptide and comprises the following motifs:
Motif 7: KAV[LF]EPTFCPMYA[QL]LCSDLNEKLP[PS]FPS[ED]EPGGKE ITFKRVLLN[NI]CQEAF or a motif having at least 50% sequence identity to Motif 7,
Motif 8: CP[AE]EENVEAIC[QH]FFNTIGKQLDE[SN]PKSRRIND[MVT]YF [SIN][RQ]LKEL[TS][TS]NPQLAPR or a motif having at least 50% sequence identity to Motif 8,
Motif 9: T[AG]P[DE]QE[ML]ERRDKERLVKLRTLGNIRLIGELLKQKMV PEKIVHHIVQELLG or a motif having at least 50% sequence identity to Motif 9;
(k) the eIF4A subunit polypeptide of the eIF4F-like protein complex comprises a CC domain comprising the amino acid sequence of SEQ ID NO: 300, and/or an amino acid sequence having at least 50% sequence identity to the eIF4G polypeptide of SEQ ID NO: 301;
(o) the eIF4A subunit polypeptide of the eIF4F-like protein complex comprises the following motifs:
Motif 13: RDELTLEGIKQF[YF]V[NA]V[ED][KR]EEWK[LF][DE]TLCDL Y[ED]TL[AT]ITQ[SA]VIF or a motif having at least 50% sequence identity to Motif 13,
Motif 14: SLVINYDLP[TN][QN][PR]E[NL]Y[LI]HRIGRSGRFGRKGVAINF or a motif having at least 50% sequence identity to Motif 14,
Motif 15: MG[LI][QK]E[ND]LLRGIYAYGFEKPSAIQQR[GA][IV]VP[FI][CI]KG[LR]DVI[QA]QAQSGTGKT[AS][TM][FI] or a motif having at least 50% sequence identity to Motif 15;
(l) the eIF4E subunit polypeptide of the eIF4F-like protein complex comprises a CC domain comprising the amino acid sequence of SEQ ID NO: 560, and/or a sequence having at least 50% sequence identity to the eIF4G polypeptide of SEQ ID NO: 561;
(p) the eIF4E subunit polypeptide of the eIF4F-like protein complex comprises the following motifs:
Motif 16: YTFSTVE[ED]FW[SG]LYNNIH[HR]PSKLAVGADF[HY]CFK[NH]KIEPKWEDP[VI]CANGGKW or a motif having at least 50% sequence identity to Motif 16,
Motif 17: T[SC]WLYTLLA[ML]IGEQFD[HY]GD[ED]ICGAVV[NS]VR or a motif having at least 50% sequence identity to Motif 17,
Motif 18: E[KR]I[AS][LI]WTKNA[AS]NE[AS T]AQ[VL]SIGKQWKEFLD YN[DE][TS]IGFIFH[ED]DA or a motif having at least 50% sequence identity to Motif 18,
or
Motif 19: WCLYDQ[IV]F[KR]PSKLP[GA]NADFHLFKAG[VI]EPKWEDPE CANGGKW or a motif having at least 50% sequence identity to Motif 19,
Motif 20: L[ED]TMWLETLMALIGEQFD[ED][AS][DE][ED]ICGVVASVR or a motif having at least 50% sequence identity to Motif 20,
Motif 21: QDKL[SA]LWT[KR][TN]A[AS]NEA[AV]QM[SG]IG[RK]KWK E[IV]ID or a motif having at least 50% sequence identity to Motif 21; or
(m) the GR-RBP polypeptide comprises one or more of the signature sequences or motifs of SEQ ID NO: 828 to SEQ ID NO: 837.

127. The method of claim 125, wherein the modulated expression or modulated activity is effected by introducing and expressing in the plant
(a) a nucleic acid encoding a C3H-like polypeptide;
(b) a nucleic acid encoding an SPT-like polypeptide;
(c) a nucleic acid encoding an IDI2 polypeptide;
(d) at least one nucleic acid encoding one of the eIF4F subunit polypeptides, a portion thereof, or a nucleic acid capable of hybridizing with said nucleic acid; or
(e) a nucleic acid encoding a GR-RBP polypeptide.

128. The method of claim 125, wherein
(a) the nucleic acid encoding a C3H-like polypeptide comprises:
(i) a nucleotide sequence that encodes any one of the proteins listed in Table A1;
(ii) a portion of the nucleotide sequence of (i); or
(iii) a nucleotide sequence capable of hybridizing with the nucleotide sequence of
(i) or (ii);
(b) the nucleic acid encoding an SPT-like polypeptide comprises:
(i) a nucleotide sequence that encodes any one of the proteins listed in Table A2;
(ii) a portion of the nucleotide sequence of (i); or
(iii) a nucleotide sequence capable of hybridizing with the nucleotide sequence of (i) or (ii);
(c) the nucleic acid encoding an IDI2 polypeptide comprises:
(i) a nucleotide sequence that encodes any one of the proteins listed in Table A3;
(ii) a portion of the nucleotide sequence of (i); or
(iii) a nucleotide sequence capable of hybridizing with the nucleotide sequence of (i) or (ii); or
(d) the nucleic acid encoding a GR-RBP polypeptide comprises:
(i) a nucleotide sequence that encodes any one of the proteins listed in Table A5;
(ii) a portion of the nucleotide sequence of (i); or
(iii) a nucleotide sequence capable of hybridizing with the nucleotide sequence of (i) or (ii).

129. The method of claim 127, wherein the at least one nucleic acid encoding one of the eIF4F subunit polypeptides comprises:
(i) a nucleotide sequence that encodes an eIF4G subunit polypeptide and/or its isoforms;
(ii) a nucleotide sequence that encodes an eIF4A subunit polypeptide and/or its isoforms;
(iii) a nucleotide sequence that encodes an eIF4E subunit polypeptide and/or its isoforms;
(iv) a portion of the nucleotide sequence of (i), (ii), or (iii);
(v) a nucleotide sequence capable of hybridizing with the nucleotide sequence of (i), (ii), or (iii);
(vi) a nucleotide sequence that encodes the eIF4 isoG subunit; or
(vii) a nucleotide sequence that encodes the eIF4 isoE subunit.

130. The method of claim 127, wherein the at least one nucleic acid encoding one of the eIF4F subunit polypeptides, a portion thereof, or a nucleic acid capable of hybridizing with such a nucleic acid, is overexpressed.

131. The method of claim 125, wherein
(a) the nucleic acid encoding a C3H-like polypeptide encodes an orthologue or paralogue of any of the proteins given in Table A1;
(b) the nucleic acid encoding an SPT-like polypeptide encodes an orthologue or paralogue of any of the proteins given in Table A2;
(c) the nucleic acid encoding an IDI2 polypeptide encodes an orthologue or paralogue of any of the proteins given in Table A3; or
(d) the nucleic acid encoding a GR-RBP polypeptide encodes an orthologue or paralogue of any of the proteins given in Table A5.

132. The method of claim 127, wherein the at least one nucleic acid encoding one of the eIF4F subunit polypeptides encodes an orthologue or paralogue of any of the polypeptides given in Table A4.

133. The method of claim 125, wherein the enhanced yield-related trait comprises increased early vigor, increased yield, increased biomass, and/or increased seed yield relative to a corresponding control plant.

134. The method of claim 125, wherein the enhanced yield-related trait is obtained under non-stress conditions.

135. The method of claim 125, wherein the enhanced yield-related trait is obtained under conditions of drought stress, salt stress, or nitrogen deficiency.

136. The method of claim 127, wherein the nucleic acid is operably linked to a constitutive promoter, a GOS2 promoter, or a GOS2 promoter from rice.

137. The method of claim 125, wherein
(a) the nucleic acid encoding a C3H-like polypeptide is of plant origin, from the genus Medicago, or from Medicago truncatuta;
(b) the nucleic acid encoding an SPT-like polypeptide is of plant origin, from the family Salicaceae, from the genus Populus, or from Populus trichocaipa;
(c) the nucleic acid encoding an IDI2 polypeptide is of plant origin, from a monocotyledonous plant, from the family Poaceae, from the genus Saccharum, or from Saccharum officinarum;
(d) the nucleic acid encoding a GR-RBP polypeptide is of plant origin, from a monocotyledonous plant, from the family Poaceae, from the genus Oryza, or from Oryza sativa.

138. The method of claim 127, wherein the at least one nucleic acid encoding one of the eIF4F subunit polypeptides, a portion thereof, or a nucleic acid capable of hybridizing with such a nucleic acid, is of plant origin, from a dicotyledonous plant, from the family Brassicaceae, from the genus Arabidopsis, or from Arabidopsis thaliana.

139. A plant or part thereof, including seeds, obtained by the method of claim 125, wherein the plant or part thereof comprises a recombinant nucleic acid encoding
(a) a C3H-like polypeptide;
(b) an SPT-like polypeptide comprising each of the following motifs from N-terminus to C-terminus:
(i) Motif I: an amphipathic helix comprising EEISTFLHQLLH, or a motif having at least 60% sequence identity to Motif I;
(ii) Motif II: an acidic domain comprising DLGDFSCDSEK or a motif having at least 60% sequence identity to Motif II; and
(iii) Motif III: a bHLH domain comprising: AAEVHNLSEKRRRSRINEKMKALQNLIPNSNKT DKASMLDEAIEYLKQL or a motif having at least 60% sequence identity to Motif III;
(c) an IDI2 polypeptide;
(d) an eIF4F polypeptide subunit; or
(e) a GR-RBP polypeptide.

140. A construct comprising:
(a) a nucleic acid;
(b) one or more control sequences capable of driving expression of the nucleic acid sequence of (a); and optionally
(c) a transcription termination sequence,
wherein said nucleic acid is selected from the group consisting of:
(i) a nucleic acid encoding a C3H-like polypeptide as defined in claim 125;.
(ii) a nucleic acid encoding an SPT-like polypeptide comprising each of the following motifs from N-terminus to C-terminus:
(i) Motif I: an amphipathic helix comprising EEISTFLHQLLH, or a motif having at least 60% sequence identity to Motif I;
(ii) Motif II: an acidic domain comprising DLGDFSCDSEK or a motif having at least 60% sequence identity to Motif II; and
(iii) Motif III: a bHLH domain comprising: AAEVHNLSEKRRRSRINEKMKALQNLIPNSNKT DKASMLDEAIEYLKQL or a motif having at least 60% sequence identity to Motif III;
(iii) a nucleic acid encoding an IDI2 polypeptide, wherein said IDI2 polypeptide comprises an IF-2B domain;
(iv) a nucleic acid encoding a subunit polypeptide and/or isoforms thereof of an eIF4F-like protein complex, wherein said eIF4F-like protein complex comprises the subunits eIF4G, eIF4A, and eIF4E, or isoforms thereof, comprising respectively the following CC domains with the PFam accession numbers:
(i) for eIF4G polypeptides: MA3 (PFam accession number: PF02847) and MIF4G (PFam accession number: PF02854);
(ii) for eIF4A polypeptides: DEAD (PFam accession number: PF00270) and Helicase_C(PFam accession number: PF00271); and
(iii) for eIF4E polypeptydes: IF4E (PFam accession number: PF01652); and
(v) a nucleic acid encoding a Glycine-Rich RNA Binding Protein (GR-RBP polypeptide), wherein said GR-RBP polypeptide comprises a RNA Recognition Motif 1 (PFam accession PF00076, RRM_{—}1).

141. The construct of claim 140, wherein one of the control sequences is a constitutive promoter, a GOS2 promoter, or a GOS2 promoter from rice.

142. A method for making a plant having increased yield, increased biomass, and/or increased seed yield, comprising introducing into a plant or plant cell the construct of claim 140.

143. A plant, plant part, or plant cell transformed with the construct of claim 140.

144. A method for the production of a transgenic plant having increased yield, increased biomass, and/or increased seed yield relative to a corresponding control plant, comprising:
(a) introducing and expressing in a plant a nucleic acid; and
(b) cultivating the plant cell under conditions promoting plant growth and development, wherein said nucleic acid is selected from the group consisting of:
(i) a nucleic acid encoding a C3H-like polypeptide as defined in claim 125;
(ii) a nucleic acid encoding an SPT-like polypeptide comprising each of the following motifs from N-terminus to C-terminus:
(i) Motif I: an amphipathic helix comprising EEISTFLHQLLH, or a motif having at least 60% sequence identity to Motif I;
(ii) Motif II: an acidic domain comprising DLGDFSCDSEK or a motif having at least 60% sequence identity to Motif II; and
(iii) Motif III: a bHLH domain comprising: AAEVHNLSEKRRRSRINEKMKALQNLIPNSNKT DKASMLDEAIEYLKQL or a motif having at least 60% sequence identity to Motif III;
(iii) a nucleic acid encoding an IDI2 polypeptide, wherein said IDI2 polypeptide comprises an IF-2B domain;
(iv) a nucleic acid encoding a subunit polypeptide and/or isoforms thereof of an eIF4F-like protein complex, wherein said eIF4F-like protein complex comprises the subunits eIF4G, eIF4A, and eIF4E, or isoforms thereof, comprising respectively the following CC domains with the PFam accession numbers:
(i) for eIF4G polypeptides: MA3 (PFam accession number: PF02847) and MIF4G (PFam accession number: PF02854);
(ii) for eIF4A polypeptides: DEAD (PFam accession number: PF00270) and Helicase C(PFam accession number: PF00271); and
(iii) for eIF4E polypeptydes: IF4E (PFam accession number: PF01652); and
(v) a nucleic acid encoding a Glycine-Rich RNA Binding Protein (GR-RBP polypeptide), wherein said GR-RBP polypeptide comprises a RNA Recognition Motif 1 (PFam accession PF00076, RRM_{—}1).

145. A transgenic plant having increased yield, increased biomass, and/or increased seed yield relative to a corresponding control plant, resulting from modulated expression of a nucleic acid encoding a polypeptide, or a transgenic plant cell derived from said transgenic plant, wherein said polypeptide comprises:
(a) a C3H-like polypeptide as defined in claim 125;
(b) an SPT-like polypeptide comprising each of the following motifs from N-terminus to C-terminus:
(i) Motif I: an amphipathic helix comprising EEISTFLHQLLH, or a motif having at least 60% sequence identity to Motif I;
(ii) Motif II: an acidic domain comprising DLGDFSCDSEK or a motif having at least 60% sequence identity to Motif II; and
(iii) Motif III: a bHLH domain comprising: AAEVHNLSEKRRRSRINEKMKALQNLIPNSNKT DKASMLDEAIEYLKQL or a motif having at least 60% sequence identity to Motif III;
(c) an IDI2 polypeptide, wherein said IDI2 polypeptide comprises an IF-2B domain;
(d) a subunit polypeptide and/or isoforms thereof of an eIF4F-like protein complex, wherein said eIF4F-like protein complex comprises the subunits eIF4G, eIF4A, and eIF4E, or isoforms thereof, comprising respectively the following CC domains with the PFam accession numbers:
(i) for eIF4G polypeptides: MA3 (PFam accession number: PF02847) and MIF4G (PFam accession number: PF02854);
(ii) for eIF4A polypeptides: DEAD (PFam accession number: PF00270) and Helicase C(PFam accession number: PF00271); and
(iii) for eIF4E polypeptydes: IF4E (PFam accession number: PF01652); and
(e) a Glycine-Rich RNA Binding Protein (GR-RBP polypeptide), wherein said GR-RBP polypeptide comprises a RNA Recognition Motif 1 (PFam accession PF00076, RRM 1).

146. The transgenic plant of claim 145, or a transgenic plant cell derived therefrom, wherein said plant is a crop plant, a monocot, a cereal, rice, maize, wheat, barley, millet, rye, triticale, sorghum, emmer, spelt, secale, einkorn, teff, milo, or oats.

147. Harvestable parts, shoot biomass, and/or seeds of the plant of claim 146.

148. Products derived from the plant of claim 146 and/or from harvestable parts, shoot biomass, and/or seeds of said plant.

149. An isolated nucleic acid molecule comprising:
(i) the nucleic acid sequence of SEQ ID NO: 139, 157, 164, 169, 171, or 186;
(ii) the complement of the nucleic acid sequence of SEQ ID NO: 139, 157, 164, 169, 171, or 186;
(iii) a nucleic acid encoding the amino acid sequence of SEQ ID NO: 140, 202, 209, 214, 216, or 231;
(iv) a nucleic acid encoding an IDI2 polypeptide having at least 50% sequence identity to the amino acid sequence of SEQ ID NO: 140, 202, 209, 214, 216, or 231, and comprising one or more of the motifs 1 to 6;
(v) the nucleic acid sequence of SEQ ID NO: 306;
(vi) the complement of the nucleic acid sequence of SEQ ID NO: 306;
(vii) a nucleic acid sequence that encodes the amino acid sequence of SEQ ID NO: 307 and confers an enhanced yield-related trait to a plant relative to a corresponding control plant;
(viii) a nucleic acid sequence having at least 30% sequence identity with any of the nucleic acid sequences of Table A4 and conferring an enhanced yield-related trait to a plant relative to a corresponding control plant;
(ix) a nucleic acid molecule which hybridizes with any of the nucleic acid sequences of (v) to (viii) under stringent hybridization conditions and confers an enhanced yield-related trait to a plant relative to a corresponding control plant;
(x) a nucleic acid encoding at least one eIF4F subunit polypeptide having at least 50% sequence identity to the amino acid sequence of SEQ ID NO: 307 and any of the other amino acid sequences in Tables A4 and conferring an enhanced yield-related trait to a plant relative to a corresponding control plant;
(xi) the nucleic acid sequence of SEQ ID NO: 848, 849, 851, 852, 853, 854, 857, 862, 873, 874, 875, 876, 878, 879, 893, 897, 898, 900, 901, 905, 928, 931, 932, 933, 934, or 937;
(xii) the complement of the nucleic acid sequence of SEQ ID NO: 848, 849, 851, 852, 853, 854, 857, 862, 873, 874, 875, 876, 878, 879, 893, 897, 898, 900, 901, 905, 928, 931, 932, 933, 934, or 937;
(xiii) a nucleic acid encoding the amino acid sequence of SEQ ID NO: 945, 946, 948, 949, 950, 951, 854, 959, 970, 971, 972, 973, 975, 976, 990, 994, 995, 997, 998, 1002, 1025, 1028, 1029, 1030, 1031, or 1034; or
(xiv) a nucleic acid encoding a GR-RBP polypeptide having at least 50% sequence identity to the amino acid sequence of SEQ ID NO: 945, 946, 948, 949, 950, 951, 854, 959, 970, 971, 972, 973, 975, 976, 990, 994, 995, 997, 998, 1002, 1025, 1028, 1029, 1030, 1031, or 1034, and comprising signature sequence 3 (SEQ ID NO: 830) and signature sequence 4 (SEQ ID NO: 831).

150. An isolated polypeptide comprising:
(i) the amino acid sequence of SEQ ID NO: 140, 202, 209, 214, 216, or 231;
(ii) an amino acid sequence having at least 50% sequence identity to the amino acid sequence of SEQ ID NO: 140, 202, 209, 214, 216, or 231, and comprising one or more of the motifs 1 to 6;
(iii) the amino acid sequence of SEQ ID NO: 307;
(iv) an amino acid sequence having at least 50% sequence identity to the amino acid sequence of SEQ ID NO: 307 and any of the other amino acid sequences in Tables A4 and conferring an enhanced yield-related trait to a plant relative to a corresponding control plant;
(v) the amino acid sequence of SEQ ID NO: 945, 946, 948, 949, 950, 951, 854, 959, 970, 971, 972, 973, 975, 976, 990, 994, 995, 997, 998, 1002, 1025, 1028, 1029, 1030, 1031, or 1034;
(vi) an amino acid sequence having at least 50% sequence identity to the amino acid sequence of SEQ ID NO: 945, 946, 948, 949, 950, 951, 854, 959, 970, 971, 972, 973, 975, 976, 990, 994, 995, 997, 998, 1002, 1025, 1028, 1029, 1030, 1031, or 1034, and comprising signature sequence 3 (SEQ ID NO: 830) and signature sequence 4 (SEQ ID NO: 831); or
(vii) derivatives of any of the amino acid sequences of (i) to (vi) above.

The application's sequence listing, which the Patent Office published only in electronic form, follows.

SEQUENCE LISTING (1034 sequences)

SEQ ID NO: 1 - DNA, 768 bp, Medicago truncatula
atgtcatctccgactgcgtcgtattggtgctaccggtgcagccgtttcgttcgagcatggaggcagcaggcgcccgacgacagaatcacctgtccagactgcgaaaccgggttcatcgaagagttcgagatccaagaagacatttctaaccggagatttcctccgccgtcttcttctgccgcggcctccgccgctatgctaatggtaggtgctcttccgtcgacagatcaaaataatcctgttcgtagaactcgcagaaacaccggtgaccgctcccctattaaccccgttatcgtgcttcgtggaggaagcgtcggtggtggagaaggaacaagtgagaatgagagcagtggacgcggattcgagttgtattatgatgatggaagtgggtctgggttgagaccgttgccgccgagcatgtcggaattttttctgggatctgggtttgaaagattattggatcagatatcgcagattgaaattaatgggctaggcagatacgagcatccgccggcttcgaaatttgcgattgagtccatgccgacagtaatcatcagcgaggggcacaccgccatagagttgcactgtgcggtgtgtaaggagcccttcgaattggaatcggaggggcgggaaatgccttgtaagcacatatatcattccgattgcatacttccatggctttcacttcgaaattcgtgcccagtttgccggcacgagttgcctggagatgatgaatcgagcaacgatcaggtcttttggggagattaa

SEQ ID NO: 2 - protein, 369 aa, Medicago truncatula
MNSESSPETPSYWCYSCTRFINLSDHTLIVCPHCDNGFVEEIAAGESPHHRLSPFPADTVSSRRQGFRRRRRDAGSRSPFNPVIVLRGAGDDGVGEDGAGAGGSAFELFYDDGDGSGLRPLPPTVSEFLLGSGFDRLLEQFSQIEMNGFGRPENPPASKAAIESMPTVEICEEHVSCELHCAVCKEEFELHAEARELPCKHLYHSDCILPWLTVRNSCPVCRHELPSDLNNPLETRVSGQIDEEAIGLTIWRLPGGGFAVGRFSGGRSAGESHFPVVYTEMDGGLNAAQGSAPRRISRTVRAHRVRESHGIGRVFRNFFSFFGRIGSRSNLNSNSGTGNVASVSRSRSLVNSMFSRNSRRRRRALELED

SEQ ID NO: 3 - DNA, 255 bp, Allium cepa
atgtctgcttcatccaattcctcctactggtgctaccgttgcgcccaatttgtccgcgccgttgaccaaccaaattcccccacttgccctaactgcagttctggcttccttgagcaaatccactcccctccgcctccctccgtcgacctccgccgctcacacctccgtcagcgccaccgttcgtcgaccaccgcaaatcaatctcccttcaaccctgtcatcctcctccgcaacaacccctcggatccggtacca

SEQ ID NO: 4 - protein, 307 aa, Allium cepa
MSASSNSSYWCYRCAQFVRAVDQPNSPTCPNCSSGFLEQIHSPPPPSVDLRRSHLRQRHRSSTTANQSPFNPVILLRNNPSDPVPETRFDLYYDDGSGSGLRPLPASMSEFLMGSGFDRLLDQLSTIGSTTVCQRNPPASKAAIESLPLVEIKFSNNSDNDLNCAVCIEKLEAGTEAREMPCKHLYHEECIFPWLSVRNTCPVCRHEVPPESPQAVSQEEGEAAGMTIWRLPGGGYAVGRFAGGREVPVVYTEMDGNGFGSNSGSEPRRVSWNGRGERSWRAKRNWGYWKGFKEFCGFFMEKEIDIK

SEQ ID NO: 5 - DNA, 255 bp, Arabidopsis thaliana
atgatgccaaattctagatcggcgacaataactccgacgacagaatcaaccaccacaacaacaacaacaacaacgactctaacgacgtcgtattggtgttacagttgtacacgattcatcagcgtttgggaagatcaagacgcaaacgctggagtcttatgtccttattgcaacggtggattcatcgaagagattgaagattcttctaattccaccgtcgcggcgattccggcttcgactccggaagttagatcg

SEQ ID NO: 6 - protein, 395 aa, Arabidopsis thaliana
MMPNSRSATITPTTESTTTTTTTTTTLTTSYWCYSCTRFISVWEDQDANAGVLCPYCNGGFIEEIEDSSNSTVAAIPASTPEVRSVEETHRSIIRRRRSNRRTSFNPVIVLHGGGGGGAGERVENEEGDGATRERRAYEFYYDDGSGSGLRPLPDSVSEILMGSGFERLLEQLSQIEASGNGIGRSGNPPASKSAIESLPRVEISDCHTKAEANCAVCTEVFEAGIEGREMPCKHIFHGDCIVPWLSIRNSCPVCRFELPSDPIQRSNEEEHAVGMTIWRLPGGGFAVGRFNAGVREGERILPVVLTEMDGGGLGSNEGPRRISWVRAHETPEMSRNGGRSGNGGRLRRAVRGMVSFMRRVRPSRGSSNSNVIDLDSDGETRVMNRSTSLIRRFF

SEQ ID NO: 7 - DNA, 255 bp, Arabidopsis thaliana
atgccgtcaacgccgacgacgccgactacaacaacgccgatcacggcttcgtattggtgttacagctgtacgcgtttcgtcagcgtttgggctgatcaaggcacaacaaccgtcggtagcgtcgcttgccctcactgcgacggcggttttatcgaacagattaacgattcttcctccgccgctaccgaattaacgattccggcttctactgaagtaagatcgatcaataacaaccgtagatccgtgattagacgc

SEQ ID NO: 8 - protein, 407 aa, Arabidopsis thaliana
MPSTPTTPTTTTPITASYWCYSCTRFVSVWADQGTTTVGSVACPHCDGGFIEQINDSSSAATELTIPASTEVRSINNNRRSVIRRRRSGRRPSFNPVIVLQGGAGEREEGEEGDAARDRRAFEFYYDDGSGSGLRPLPDSVSEILMGSGFERLLEQLSQIEASATGIGRSGNPPASKSAIESLPRVEISDCHIGSEANCAVCTEIFETETEAREMPCKHLFHDDCIVPWLSIRNSCPVCRFELPSEPNRRSNNNEEDNAVGMTIWRLPGGGFAVGRFNAAMRDGERVLPVVLTEMDGGGIGNSQDGPRRISWVRSHGTLESDSNGTGSGSGSGGRLRRMVRGMVSLMRRVRPNRSSSSSSAAISTSSDNLDLNIEVESRVLDRSNSVMRRYFRRNRSNRDSSSSVLH

SEQ ID NO: 9 - DNA, 255 bp, Brassica napus
atgccgtcgccgtcaacgcccataacatcgtcgtattggtgttacagctgcacgcgattcgtcaacgtctggtccgaatccgaacaaggcgctaccaccgtcagcgtctcttgcccgcactgcgacggcggtttcatcgaagagatcaccgatccctcctccgccgccgctgccgaactaactcctccaccttccaccgaagtcagatcgatcatcaacaaccgcagatctataatcagacgccggagatccact

SEQ ID NO: 10 - protein, 395 aa, Brassica napus
MPSPSTPITSSYWCYSCTRFVNVWSESEQGATTVSVSCPHCDGGFIEEITDPSSAAAAELTPPPSTEVRSIINNRRSIIRRRRSTPHPSFNPVIVLQGGDGERDDGEEEEARDRRRAYEFYYDDGSGLGLRPLPDSVSEILMGSGFERLLEQLSQIDAAAGIGLGRSGNPPASKSAIESLPRVEISDCHVGAEANCAVCTEVFEAESEAREMPCKHIFHEDCIVPWLSIRNSCPVCRFELPSEGNVEEGDNNPVGMTIWRLPGGGFAVGRFNAAMREGERVLPVVLTEMDGGGIGGNSDGHRRISWVRANGTFESGSSNGGGGGGGSGSGGRLRRMVRGVVSLMRRVRSNRGVSSSSNQLGLDSEVETRVMDRSNSVLRRYFGRNRSNRDSSVLH

SEQ ID NO: 11 - DNA, 255 bp, Citrus clementina
atgtcttcaatcggattgtcgtactggtgctaccgctgcaaccggatcatccggattcaggccaggaccgaagacgcaatcgtttgccccgattgccataccggcttcatcgaacagattgaaaccattcggcgaccttcgaacgagagatatcccgccgccgaaatgtacttagacgacacccaaaacccggagacattcccgaccacgaggtttggtcggactcggagaaacggcggagaccgatcccctttc

SEQ ID NO: 12 - protein, 317 aa, Citrus clementina
MSSIGLSYWCYRCNRIIRIQARTEDAIVCPDCHTGFIEQIETIRRPSNERYPAAEMYLDDTQNPETFPTTRFGRTRRNGGDRSPFNPVIVLRGPRTPDSGGGNEGTAMERGNFELFYDDATGAGLRPLPASMSDFLMGSGFDRVLDQLTQLDFNGVTRFVNPPASKAAIESMPVVTIAESHVAKESHCAVCKEPFQLNSEAREMPCKHIYHGECILPWLSMRNSCPLCRRELPNEANDRGSNVGGGPDETLGLTIWRLPGGGFAVGRFMAAEDPRERATRCFYGNGWGVHAPFGAPGGFLGCPPKKGRGGQGICPGF

SEQ ID NO: 13 - DNA, 798 bp, Citrus clementina
atgtcttcaatcggattgtcgtactggtgctaccgctgcaaccggatcatccggattcaggccaggaccgaagacgcaatcgtttgccccgattgccataccggcttcatcgaacagattgaaaccattcggcgaccttcgaacgagagatatcccgccgccgaaatgtacttagacgacacccaaaacccggagacattcccgaccacgaggtttggtcggactcggagaaacggcggagaccgatcccctttcaaccctgtcatcgtcctccgtgggccccggacccctgattcaggcggtggaaatgaaggaactgccatggagagaggaaacttcgagcttttttatgacgacgctaccggggcgggtcttaggccattacccgcgagcatgtcggactttttgatgggttcgggttttgaccgggtcctcgaccagttaacacagttagattttaacggggtgacgaggttcgtgaaccctccggcttcaaaggctgcgatcgagtcaatgccggtggtcacaattgcagaaagccacgtggcgaaggaatcgcactgtgccgtttgtaaagagccattccagctcaattcggaggctcgtgagatgccgtgtaagcacatttatcatggtgaatgtattctcccttggctttcgatgcgcaactcgtgcccattgtgccggcgcgagttgccgaatgaagcaaatgacagaggcagcaatgtcggaggtggcccccatgaaacgctggggttaacaattttggaggttgcccgggtggcgggttcgctgtag

SEQ ID NO: 14 - protein, 265 aa, Citrus clementina
MSSIGLSYWCYRCNRIIRIQARTEDAIVCPDCHTGFIEQIETIRRPSNERYPAAEMYLDDTQNPETFPTTRFGRTRRNGGDRSPFNPVIVLRGPRTPDSGGGNEGTAMERGNFELFYDDATGAGLRPLPASMSDFLMGSGFDRVLDQLTQLDFNGVTRFVNPPASKAAIESMPVVTIAESHVAKESHCAVCKEPFQLNSEAREMPCKHIYHGECILPWLSMRNSCPLCRRELPNEANDRGSNVGGGPHETLGLTILEVARVAGSL

SEQ ID NO: 15 - DNA, 738 bp, Curcuma longa
atgtttccttcccgggcggcgacgccgtcgtatcggtgctgtcggtgcagccgcttcgtccgggtgcggcgagaggacgccgtcgaatgccccgactgccgcggagggttccttgaggaagtggcttctccccctccgcgcttccccatcgccgccgaacccggccacgggcggatcccctccgccgaccttgccaccgacggtgctgctgcggctgctcccccgccacgaacctcggaactcaggttccgccgcaaccgccgcagcccttcccaagggggtcaagatgaaccccgccgcgtcgccgccatcagcagcttcgagttgtactacgacgacggcaccggctctggtctccgccccttgccggagagtatttctgatttcctgatggggtcaggcgttgaccacctccttcagcagcttgcgcagatcgagatcaatggtacgggccgcgagcggggatgggagcatccaccggcgtcgaaggccgcaatagaatcaatgcctacgatagagatcacggacgaccacattgtcaaagactgccattgcgccatctgcaaggaccccttcgagctcggggatgaggcccgggagatgccctgcgagcacatcttccatcaagattgcattttcccctgggctttcaatgcggaactcgtgccccgtttgccgccgtcagatgccggcggaagcagggggaagggacgcggagccgccagcgatctccggtga

SEQ ID NO: 16 - protein, 245 aa, Curcuma longa
MFPSRAATPSYRCCRCSRFVRVRREDAVECPDCRGGFLEEVASPPPRFPIAAEPGHGRIPSADLATDGAAAAAPPPRTSELRFRRNRRSPSQGGQDEPRRVAAISSFELYYDDGTGSGLRPLPESISDFLMGSGVDHLLQQLAQIEINGTGRERGWEHPPASKAAIESMPTIEITDDHIVKDCHCAICKDPFELGDEAREMPCEHIFHQDCIFPWAFNAELVPRLPPSDAGGSRGKGRGAASDLR

SEQ ID NO: 17 - DNA, 255 bp, Curcuma longa
atgccttcttccatggcggcgccgtcttcctactggtgctaccgctgtagccgactcgtcgtgttgcggccgcaggacgccatcgtatgccccgactgcgacggaggattcctccagcagatcgactcgccgcctcaccaatttcactctccctcggcgaaccgccgtcgccgcagccgccacgccgcgtcgtcatcgcctgactctcacaccgtcatcagcgtcggatccgtccccgccggtcgctcccatcag

SEQ ID NO: 18 - protein, 354 aa, Curcuma longa
MPSSMAAPSSYWCYRCSRLVVLRPQDAIVCPDCDGGFLQQIDSPPHQFHSPSANRRRRSRHAASSSPDSHTVISVGSVPAGRSHQPSGLRRHRHRRSSASDRSAFNPVVVLLSPSRGGTSFELYYNEGTGSGLHPLPEAISDLLMHSGFERLLDHLAQVELTGIGREIGCDNPPASKSAVESMPAVEIVTDHISKECHCAICMDPFELGTQALEMPCKHIYHRDCILPWLSLHNSCPVCRHQMPAAKDDEPVAAARSEEEETVGLIIWRLPGGGFAVGRFSGGRRAVEEQLPAAYAEMDGTALNNRRQSAPAVCSFFSFFRLSRSASSSSSSSSSSCSPPLSNPEAIPSASAIA

SEQ ID NO: 19 - DNA, 255 bp, Citrus sinensis
atgtcttcaatcggattgtcgtactggtgctaccgctgcaaccggatcatccggattcagtccaggactgaagacgcaatcgtttgccccgattgccataccggcttcatcgaacagattgaaaccattcagcgaccttcgaacgagagatatcccgccgccgaaatgtacttagaagacacccaaaacccggagacattcccgaccacgaggtttggtcggactcggagaaacggcggagaccgatcccctttc

SEQ ID NO: 20 - protein, 353 aa, Citrus sinensis
MSSIGLSYWCYRCNRIIRIQSRTEDAIVCPDCHTGFIEQIETIQRPSNERYPAAEMYLEDTQNPETFPTTRFGRTRRNGGDRSPFNPVIVLRGPQTPDSGGGNEGTAMERGNFELFYDDATGAGLRPLPASMSDFLMGSGFDRVLDQLTQLDFNGVTRFVNPPASKAAIESMPVVTIAESHVAKESHCAVCKEPFQLNSEAREMPCKHIYHGECILPWLSMRNSCPLCRRELPNEANDRGSNVGGGPDETLGLTIWRLPGGGFAVGRFNGSRRAAERELPVVFTEMDGGFNAPIGAPRRISWVPSRRRAREGNGFARAFRGFTSLLGRIRLPTSRATAEFNRRSPFLDVIYGL

SEQ ID NO: 21 - DNA, 255 bp, Fragaria vesca
atggccatgtcttcgccgtctccgacgacgtcgtattggtgccaccgctgcacccgcttcgtccgcatcctcctccaagacgcctccgtcacctgcccttactgcgacaccggcttcctcgaagagatagacaccaccccgccgccggccccgactcacctccaccgccgcttcccgccttcctatactcacgatcagaacccgcccccgacgtcgcggcgggtccgccggagctccggcgaccggtcgcctttc

SEQ ID NO: 22 - protein, 356 aa, Fragaria vesca
MAMSSPSPTTSYWCHRCTRFVRILLQDASVTCPYCDTGFLEEIDTTPPPAPTHLHRRFPPSYTHDQNPPPTSRRVRRSSGDRSPFNPVIVLRGAADDSESSSFELYYDDAAGSGLRPLPPTMSEFLMGSGFDRLLEQLAQIEITGLGRPENPPASKSAVESMPVVKIDESHVGSESHCAVCKEAFEFGSEAREMPCSHIYHSDCILPWLSMRNSCPVCRHELPVDRNSEPGHDEEATGLTIWRLPGGGFAVGRFSGARRPGERELPVVYTEMDGGFNGSGAPRRVLWASRNRGRESRGIGRAFRNFASFFGRFRSNSSSRTGSETGSEAFSRSRSHSNSVFGRYVQRRSRAWVLDD

SEQ ID NO: 23 - DNA, 255 bp, Gossypium hirsutum
atggaatcgattagatcgccctattggtgctacagatgcaatcgattcatccggatccgggttcgatctccccatgattcgctcaactgccccgactgtggcggaggattcatcgaagaaattgaaacaccctcgcgatctcccatccaccaccgtttccctgtcgctgccatgtattccgacacgccaagccctgcgctcagcccaagccccaccgccactcctcattttcgccgaactcgtcggaacgctggc

SEQ ID NO: 24 - protein, 369 aa, Gossypium hirsutum
MESIRSPYWCYRCNRFIRIRVRSPHDSLNCPDCGGGFIEEIETPSRSPIHHRFPVAAMYSDTPSPALSPSPTATPHFRRTRRNAGDRSPFNPVVVLRGPTSESDGIVTERGNRNFELYYDDGSGSGLRPLPASMSEFLMGSGFDRLLDQLSQLEANGVGRFEQPPASKAAIESMPVIKILGSHVRSESHCAVCKEPFELDSEAREMPCKHIYHSDCILPWLSIRNSCPVCRHELPTENNGNNLAENEAVRDEEAVGLTIWRLPGGGFAVGRFTGGTRAAEREFPLVFTEMDGGFNNAGAAPRRISWAPSGRRSQESRGLGRVFRSFVSFFGRFRSSSRSGSDSGFTRRSRSSSVFGRSSRRDSDWDFED

SEQ ID NO: 25 - DNA, 669 bp, Gossypium hirsutum
atggcagcaacgacgtcgtattggtgttaccaatgcaatcagttcttcttgatttccaacgaagatccgattacttgccccgactgtgacggcggattcatcgaagagatcgataacatgcctcatgcagcgcgtgctctccacgctgactcccgtctcgtcggcggcgatggattcaccgcgatgtacaatagctcaactacccttcgtcgaagccggatgaacggtggcgatcgttctccttttaatcccgtcatcgtcttggcgtcaccttccggggaaagtacaaatgttgaacagagtgggagggggtttgagctttattatgacgacggaggtggattgggtttgcggcctttaccggcgagcatgtcggagtttctgttaggtcctgggtttgaccggttaattgagcagttatcacaaatggaaatccaaaacattgggcgtcacaaccaaccgccggcgtcgaaatcggcggttgaggcaatgccaatggtggaaatagacgatacccatatccataacgaactgttctgtgcggtatgtaaagaacaattcgagttaggaaccaaagttttaaacatgccttgtaaccatttgtaccattcaaactgtttactcccttggcttcggttgcgaaattcatgccccgtttgcccgccatga

SEQ ID NO: 26 - protein, 222 aa, Gossypium hirsutum
MAATTSYWCYQCNQFFLISNEDPITCPDCDGGFIEEIDNMPHAARALHADSRLVGGDGFTAMYNSSTTLRRSRMNGGDRSPFNPVIVLASPSGESTNVEQSGRGFELYYDDGGGLGLRPLPASMSEFLLGPGFDRLIEQLSQMEIQNIGRHNQPPASKSAVEAMPMVEIDDTHIHNELFCAVCKEQFELGTKVLNMPCNHLYHSNCLLPWLRLRNSCPVCPP

SEQ ID NO: 27 - DNA, 255 bp, Gossypium hirsutum
atgtcttcaacgtcttcgtattggtgttacagctgcacccgtctggttcgggtggtggttttggatagcgggtcaaacgacgccgttgtctgcccgtactgcgacggaggcttcatcgaggagatcgaatcttcggataatcacaaccgtcggtttccagctatgtacatgatcaccagcaacgataatagccgtcaaaattcgaatcgggcgcgaaatctcgtctttcgtaggaatcgtcgtggttctgttgac

SEQ ID NO: 28 - protein, 366 aa, Gossypium hirsutum
MSSTSSYWCYSCTRLVRVVVLDSGSNDAVVCPYCDGGFIEEIESSDNHNRRFPAMYMITSNDNSRQNSNRARNLVFRRNRRGSVDRSNINPIIVLRGSTDDENGSTNGNSNINSGFGFFYDDGSGSGLRPIPTSMSESLMGLGFDRLLEQLSQIELTGLGQPENPPASKSAIESMPTIQIEKAHVCSETHCAVCKEPFELGSEAKEMPCKHIYHEDCIIPWLALRNSCPLCRHELPSDRSESNDEASETVGLSIWRLPGGVFAVGRFRGEREVPVVYTEMDGGFGESGSESGSGHGAARRVSWVGVRRRGNGFRRVVTNVTSFLRGLTSQPSHRGNEESGGLTRSGSTSMFRTFTRSLSSSSNSVL

SEQ ID NO: 29 - DNA, 255 bp, Gossypium hirsutum
atgtcttcaacgtcgtcgtattggtgttacagctgctcccttctgtttcgcatctcggcttcagataacgcaaccaacgaagccattgtatgcccctactgtgacggaggtttcatcgaggagattgagtcatccgatgatcatacccctcggtttccacctacctacatcatccccagcaaccgtcgagactcggatcggaaccggaaccccgtttctcgtcgaaatcgttggattcctattgaccacttaaac

SEQ ID NO: 30 - protein, 322 aa, Gossypium hirsutum
MSSTSSYWCYSCSLLFRISASDNATNEAIVCPYCDGGFIEEIESSDDHTPRFPPTYIIPSNRRDSDRNRNPVSRRNRWIPIDHLNINPIIVLRGTTGDESTTATDGNNNNSSEFDFFYDDGSGSGLRSIPTSMSESLMGLGFNRLLAHLSQIEITGLGQHQNHPASKTAIESMPTIQIEATYVRSETYCAVCKEPFELGTEAREMPCKHIYHQDCIIPWLSLRNSCPICRHEVPSDRSELNDDVLETVGFSIWRLPGGLFGVTRVRREREVPVVYPEMDVGFGEWGSDSGHGDVTTVSWGEVRRRENGFRRVVRNVTSFCDA

SEQ ID NO: 31 - DNA, 255 bp, Gossypium hirsutum
atgttcactcttttcggaatggaggtgccttctttcctcttttttgtaaaagtccccctcttttttgttttgttaatctgtatggcaacgacgacgtcgtattggtgttaccaatgcaatcggttcttcttgatttccaacgaagatccgatcacttgccccgactgtgacggcggattcgtcgaagagatcgataacatgcctcatgcagcgcgtgctttccacgctgactcccgtctcgtcggcggcgatgga

SEQ ID NO: 32 - protein, 389 aa, Gossypium hirsutum
MFTLFGMEVPSFLFFVKVPLFFVLLICMATTTSYWCYQCNRFFLISNEDPITCPDCDGGFVEEIDNMPHAARAFHADSRLVGGDGFTAMYNSTTTLRRSRMNGGDRSPFNPVIVLASPSGESTNVEQSGRGFELYYDDGGGLGLRPLPASMSEFLLGPGFDRLIEQLSQMEIQNIGRHNQPPASKAAVEAMPMVEIDDTHINNELFCAVCKEQFELGTKVLNMPCNHLYHSNCLLPWLRLRNSCPVCRHELPAAIGEEGDGSSNSLDETPMGLTIWRLPGGGFAVGRFSAGENREFPVVYTEMDGGFSGGGSVPRRVSWGSVGRERGGYFRRVLRNMFGCFSGSSFFPRLDSRIRRSSRSFSLFSPPSRRRGWAFELDNARFRSRRRRR

SEQ ID NO: 33 - DNA, 255 bp, Glycine max
atgaatttggaaacgcaaccaggaacggcgtcgtattggtgctacagctgcacccgtttcgtgcacctctctgtccaaagcaccatcgcctgcccccactgtcaaagcggtttcgtcgaagagatccgtgccggcgccggagccgaagcctcgccacgccatcgactaagtcctttccccgatgatcctcttttgctccggcgacagggcttccgccgccgtaggagagaagcttccggcaaccgctccccgttc

SEQ ID NO: 34 - protein, 361 aa, Glycine max
MNLETQPGTASYWCYSCTRFVHLSVQSTIACPHCQSGFVEEIRAGAGAEASPRHRLSPFPDDPLLLRRQGFRRRRREASGNRSPFNPVIVLRGPGDDSAAADHDGVSTFELFYDDGDGTGLRPLPPTMSELLLGSGFDRLLEQFAQIEMNGFGRPENPPASKAAIESMPTVEIGETHVETEAHCAVCKEAFELHAEARELPCKHIYHSDCILPWLSMRNSCPVCRHELPSDLETRVPSQIDEETIGLTIWRLPGGGFAVGRFSGGRRTGESHFPVVYTEMDGGLNTNGGAPRRISRSVRSNRVRESRGFGRVISNFFSFFGRIGSRNSSSGHGSVSRSRSHVSSIFNRSSRRHSRTWVMDD

SEQ ID NO: 35 - DNA, 255 bp, Glycine max
atgatgatgtcttccgggacatcctcgtactggtgctaccgctgcagccgcttcgtccgtgtctggccccaccacaccgtcgtctgtcccgactgcgacggcggcttcatcgaagaaatcgaacacccgccccgctccgtccacctcgacccccgacgccaccgccatcgcttccccgctgccgccatgtacatgatcggacaacgaccctcctccgacccccgccccgcctcatccctccgccgcacccgccgc

SEQ ID NO: 36 - protein, 393 aa, Glycine max
MMMSSGTSSYWCYRCSRFVRVWPHHTVVCPDCDGGFIEEIEHPPRSVHLDPRRHRHRFPAAAMYMIGQRPSSDPRPASSLRRTRRNGGDRSPFNPVIVLRGGAEDESRGFELFYDDGTGSGLRPLPPSMSEFLLGSGFDRLLEQLSQIEINGIGRYEHPPASKAAIDSLPTIEIDDTHLAMESHCAVCKEAFETSTAVREMPCKHIYHPECILPWLALHNSCPVCRHELPADTPNPNPNPNSNSNSNQNPSQNVGLNEEENVGLTIWRLPGGGFAVGRFSGGRRGADRELPVVYTEMDGGFNNGGGEPRRISWSRGNRGRESGGLNRFFRNLFGCFRGGSSNTSSSGGASATQRSASSRESMRASSSRSSTMDLSPRSRRTWSMDVNSGMRAW

SEQ ID NO: 37 - DNA, 255 bp, Glycine max
atgaatttggatacgcaacccggaacgccgtcgtattggtgctacagctgcactcgtttcgtgcacctctctgtccaagccaccatcgcctgcccccactgtcaaagcggtttcgtcgaagagatccgcgccggcgccgaagcctcgccacgccaccgtctaagtcctttccctgacgatcccctttctttccggcgacagggcttccgccgccgtaggagagaaggtgccggcaaccgctccccgttcaacccc

SEQ ID NO: 38 - protein, 361 aa, Glycine max
MNLDTQPGTPSYWCYSCTRFVHLSVQATIACPHCQSGFVEEIRAGAEASPRHRLSPFPDDPLSFRRQGFRRRRREGAGNRSPFNPVIVLRGPGDDSAAADHDGASTFELFYDDGDGTGLRPLPPTMSEFLLGSGFDRLLEQFAQMEMNGFGRPENPPTSKAAIESMPTVEIGETHVETDAHCAVCKEVFELHAEARELPCKHIYHSECILPWLSMRNSCPVCRHELPSDLETRVPSQIDEEAIGLTIWRLPGGGFAVGRFSGGRRTGESHLPVVYTEMDGGLNTNGGAPRRISRSVRSNRVRESRGFGRVFRNFFSFFGRIGSRNSSSSSEHGSVSRSRSHVSSMFNRSSRRHSRTWVMDD

SEQ ID NO: 39 - DNA, 255 bp, Glycine max
atgaattcggacacgacttcctattggtgctacagctgcacgcgcttcgttcacatacaagaacagaacgacgtcgtttgcccgcgctgccacggcggcttcgtcgaaaaggtcaccgccccccaatcgtcaaggcaaggcttccgccgccgacgccgcaacgccgggaaccactcggcgttcaacccggtgatcgtgctccgcggaccgggagaggacgaggagagcagctttgagttatactacgacggcttc

SEQ ID NO: 40 - protein, 314 aa, Glycine max
MNSDTTSYWCYSCTRFVHIQEQNDVVCPRCHGGFVEKVTAPQSSRQGFRRRRRNAGNHSAFNPVIVLRGPGEDEESSFELYYDGFDGEGLRPLPSTMSEFLLGSGFDRLLEQVSQIEINGLGRAENPPASKAAIESMPTVEITESHVASETICAVCKEAFELGALAREMPCKHLYHSDCILPWLSMRNSCPVCRHELPSEQTAPETRVAGQIEEEAVGLTIWRLPGGGFAVGRFAGESHLPVVYTEMESDGNSNEGSRRISLAVGSGRVRESRGGGFGRIFRNLFGRIGALTRSRSLSTSLFNRRSSRAWVLGN

SEQ ID NO: 41 - DNA, 255 bp, Glycine max
atgaactcggacacgacgtcgtattggtgctacagttgcacgcgcttcgttcacatccacgaccagaacgacgtcgtgtgcccccgctgccatggcggcttcgtcgaaaaggtcaccgccgggcaatcggcaaggcaggggttccgccgccgccgccgcaacgccgggagccactcgccgttcaacccggtgatcgtgctccgtggaccgggggaggacgaggagagcagctttgagttatactacgacggattc

SEQ ID NO: 42 - protein, 314 aa, Glycine max
MNSDTTSYWCYSCTRFVHIHDQNDVVCPRCHGGFVEKVTAGQSARQGFRRRRRNAGSHSPFNPVIVLRGPGEDEESSFELYYDGFDGEGLRPLPSTMSEFLLGSGFDRLLEQVSQIEINGLGRPENPPASKAAIESMPTLEITESHVASETTCAVCKEAFELGELAREMPCKHLYHSDCILPWLSMRNSCPVCRHELPSEQAAPETRVAGQIEEEAVGLTIWRLPGGGFAVGRFAGESPLPVVYTEMESGGNSNEGSRRISLAVGGGRVRESRGGFGRIFRNLFGRIGALTRSRSLSTSLFNRRRSTRTWVLGN

SEQ ID NO: 43 - DNA, 255 bp, Glycine max
atgatgatgtcttccgggacatcctcgtactggtgctaccgctgcagccgcttcgttcgcgtctggccccaccacaccatcgtctgtcccgactgcgacggcggcttcatcgaagaaatcgaacacccgccccgctccgtccacgtcgacccccgcggccgccaacgcttccccgccgccgccatgtacatgatcggccagcgcccttcctcggaccacccctcccgccccgctgccctccgccgcacccgccgc

SEQ ID NO: 44 - protein, 354 aa, Glycine max
MMMSSGTSSYWCYRCSRFVRVWPHHTIVCPDCDGGFIEEIEHPPRSVHVDPRGRQRFPAAAMYMIGQRPSSDHPSRPAALRRTRRNGGDRSPVNPVIVLRGGAATAEDESRGFELFYDDGAGSGLRPLPPSMSEFLLGSGFDRLLEQLSQIEINGIGRYEHPPASKAAIDSLPTIEIDDTHLAMESHCARMPCKHIYHPECILPWLALHNSCPVCRHELPADTPNPNQNQNPSQNVALNEEENVGLTIWRLPGGGFAVGRFSGGRRGAERELPVVYTEMDGGFNNGGGEPRRISWSRGNRGRESGGLTRFFRNLFGCFRGKSMRASSSRSSTMDPSLRSRRTWSMDVNSGMRAW

SEQ ID NO: 45 - DNA, 255 bp, Glycine max
atggcatcactgggatctccgtcttcatcattctggtgctaccgctgcaaccgcatcgttagggttccacaaaacgacgccgttctcctctgcccagattgcaactccggcttcctagaagagctacaaacccctccccactcgcgccgatccacgcgcggcggcggcgggtcccccttcaacccggtaatcgtcctccgcaacgcgaacgacgtcgtctcgcccgaaacgcggaacttcgaactctactacaac

SEQ ID NO: 46 - protein, 312 aa, Glycine max
MASLGSPSSSFWCYRCNRIVRVPQNDAVLLCPDCNSGFLEELQTPPHSRRSTRGGGGSPFNPVIVLRNANDVVSPETRNFELYYNDAVSGSSGPSTLRPLPQGVTEFLLGSGFDNLLDQLDGAAGGSAPPPPAAASKAAIESMPVVKILASHTYAESHCAVCMENFEINCDAREMPCGHVYHSECIVPWLSVRNSCPVCRHEVPSDEVEESNSNSNNNTVGLTIWRLPGGGFAVGRFIGGRELPLVYTEMDGGFNGANGAPRRVAWDSSVGRSRESRGFGSALRNVFSYFGRVRSSFSRRTRNSRANGRSRS

SEQ ID NO: 47 - DNA, 255 bp, Gossypium raimondii
atggcagcaacgacgtcgtattggtgttaccaatgcaatcagttcttcttgatttccaacgaagatccgattacttgccccgactgtgacggcggattcatcgaagagatcgataacatgcctcatgcagcgcgtgctctccacgctgactcccgtctcgtcggcggcgatggattcaccgcgatgtacaatagctcaactacccttcgtcgaagccggatgaacggtggcgatcgttctccttttaatcccgtc

SEQ ID NO: 48 - protein, 366 aa, Gossypium raimondii
MSSTSSYWCYSCTRLVRVVVLDSGSNDAVVCPYCDGGFIEEIESSDNHNRRFPAMYMITSNDNSRQNSNRARNLVFRRNRRGSVDRSNINPIIVLRGSTDDENGSTNGNSNINSGFGFFYDDGSGSGLRPIPTSMSESLMGLGFDRLLEQLSQIELTGLGQPENPPASKSAIESMPTIQIEKAHVCSETHCAVCKEPFELGSEAKEMPCKHIYHEDCIIPWLALRNSCPLCRHELPSDRSESNDEASETVGLSIWRLPGGVFAVGRFRGEREVPVVYTEMDGGFGESGSESGSGHGAARRVSWVGVRRRENGFRRVVRNVTSFLRGLRFQPSPRGNEESGGLPRSGSTFMFCRFPRSLSSSSSSVL

SEQ ID NO: 49 - DNA, 255 bp, Lotus japonica; identical to SEQ ID NO: 27

SEQ ID NO: 50 - protein, 379 aa, Lotus japonica
MSFETQPETASYWCYSCTRFVHLSAAGNIACPHCETGFVEEIHPDQSPNHAHAHGLSPLPEDPVSSRRLGFRRRRRDTGSRSPFNPVIVLRGTADDGADQEGGAAAAFELYYDDGDGTGLRPLPPTVSEFLLGSGFDRMLEQFSQIEMNGFGRPENPPASKAAIESMPTVEIGEMEACNEAQCAVCKEEFELGAEARELPCKHIYHSDCIVPWLSMRNSCPVCRHELPSDLNANPLRAPGQIDEEAIGLTIWRLPGGGFAVGRFSGGRSAGESHLPEVYTEMDGGVNSNRAPRRVSPTVSGHRVRERRGIGRVFRGFLSFFGIRGSSRSTRSSSSSISSLSSSYSGNSEVSTTGLSQLSSSLNRNSRRRRNMSQLVLED

SEQ ID NO: 51 - DNA, 255 bp, Lactuca sativa
atgagtttcgaaacgcaacccgaaacggcgtcgtactggtgctacagctgcacccgcttcgtccacctctccgccgccggcaacatcgcctgcccccactgcgaaaccggcttcgttgaagagatccaccccgaccaatcaccgaatcacgctcacgctcacggtctcagcccgttacctgaagatcccgtttcttcccggcggctaggtttccgccgcagacgccgcgacaccggaagccgctcccctttcaac

SEQ ID NO: 52 - protein, 387 aa, Lactuca sativa
MSMDDSSSSSYWCYRCSQFINVPTHRLDSSFFCPDCNGGFIEELGSPTQIPESTLSDSHRRRFPAAALYMVGNEQHSSVSSPSPPVLRRTVRNPGDRSPFNPVIVVRGQTSNANTPPVESGNGRGFEMYYDDGAGSGLRPLPVSMSKFLLGAGFDRLLDQLTQIEANGLGRIDQNPPASKAAIEALPTIEIQEIHTFTESHCAVCKDPFELQTEAKEMPCKHLYHSDCILPWLSLRNSCPVCRHELPSDNQESVSDDNDVAAGLTIWRLPGGGFAVGRRGREREIPVVFTEMDGGFNINGGPWRRRSWDLRGNGGGGNGGLRRLFNNMFSCFSGGGRRGRRGLSSSSSSSSDDGVSHRSRFIPTIFSSSSRRQRAWASDVNNRPQMW

SEQ ID NO: 53 - DNA, 255 bp, Manihot esculenta
atgtcaatggatgattcttcatcctcatcatattggtgctacagatgcagccaatttatcaatgttccgactcaccggttagattcttctttcttttgcccggattgcaacggtggattcatagaggagctcggtagcccgacccagatacccgagtcaacactttcggactctcaccggagacgttttcctgctgcggctctatacatggtcggaaacgagcaacatagctcagtatcaagtcctagcccaccg

SEQ ID NO: 54 - protein, 255 aa, Manihot esculenta
MSSPTASYWCYRCSRFVRAWRQQAPDDRITCPDCETGFIEEFEIQEDISNRRFPPPSSSAAASAAMLMVGALPSTDQNNPVRRTRRNTGDRSPINPVIVLRGGSVGGGEGTSENESSGRGFELYYDDGSGSGLRPLPPSMSEFFLGSGFERLLDQISQIEINGLGRYEHPPASKFAIESMPTVIISEGHTAIELHCAVCKEPFELESEGREMPCKHIYHSDCILPWLSLRNSCPVCRHELPGDDESSNDQVFWGD

SEQ ID NO: 55 - DNA, 255 bp, Medicago truncatula
atgaattctgaatcctcacccgaaacgccgtcgtactggtgctacagttgcacacgcttcatcaatctatccgatcacaccctcatcgtttgtcctcactgcgataacggtttcgtcgaagagatcgccgccggcgaatccccgcatcaccgtctaagtccttttcctgcggataccgtttcttctcgccgacaaggcttccgccgtcgccgtcgtgacgctggtagtcgttcacctttcaatcctgtcatcgtt

SEQ ID NO: 56 - protein, 355 aa, Medicago truncatula
MNSETETPSSTTSFWCYSCTRFIHILNQNNVVCPHCQNGFVEEIHAGQSPAVSLFADGIQSSRRQTSRRRRRNAGGSRSPFNPVIVLRGPREDTTAGVGADAGGGDSEGNTSSFELYYEDSNGTDLRPLPPSMSELLLGSGFDRLLEQFSQIEINGFGRSENPPASKAAIESIPTVEITDSEMESEIHCAVCKEQFELGSEARKMPCNHLYHSDCILPWLSMRNSCPVCRHELPSDQNASESRISGQIDEEAVGLTIWRLPGGGFAVGRFAGGRRAGEIQLPIVYTEMDGNNSNEDSRRISLTVGSNRVRERRGIRRIFRNFLSFFGNVNLNRSFSGSLFRRSSRRRSRTWVTEE

SEQ ID NO: 57 - DNA, 255 bp, Nicotiana benthamiana
atgaactcggaaactgaaacaccatcctcaacgacgtcgttttggtgctacagctgcacacgtttcattcacatcttgaaccaaaacaacgttgtttgtcctcactgccaaaacggcttcgttgaagagattcacgccggtcaatcaccggcggtttctcttttcgccgacggaattcagtcctccagaagacaaacctcccgccgcagacgtcgtaacgccggcggcagccgttcgccttttaatccggtgatc

SEQ ID NO: 58 - protein, 281 aa, Nicotiana benthamiana
MSSSYWCYRCTRFVRISAASDVICPYCDSGFIEAAEASNIGSSPATRRRLNWRPDSERSVNMGFRRSRRNRGGDRSPFNPVIVLRSPSETPNGDDEAAGEERSYELYYDDGEGSGLRPLPPTMSEFLMGSGFNRLLDQLAQIEVNGFGRPENPPASKSAIESMPILEIASHHVNTEEHCAVCKEAFVLGSEAREMPCKHIYHTDCILPWLSLRNSCPVCRHELPAESPETTTSGDFIRSRNDEEAMGLTIWRLPGGGFAVGEICRRKTGSGKRTSGSVYRN

SEQ ID NO: 59 - DNA, 846 bp, Nicotiana benthamiana
atgtcttcatcgtattggtgttaccggtgtacgcgatttgttaggatttcagctgcgagcgacgtcatttgtccatactgtgatagtggatttattgaagctgctgaggctagtaatattggatcgtcgccggcaactcgccggcgattgaactggcggccagattcagaacgtagtgttaacatgggatttcgccggagccggcgtaatcgtggtggagacagatctccgttcaatccggttattgttcttcgtagtccgtcggaaactcctaacggagatgatgaagctgcaggagaggagcggagttacgagctttactatgacgacggcgaaggttctggtctccggccgttaccgccgacgatgtcagagtttttaatgggatctggatttaaccgtttgctcgatcagctggcgcaaatcgaggtgaacggattcggccggccggagaatccgccggcgtcgaaatcggcgattgaatcgatgccgatcttagaaatagcatctcatcacgtgaatacagaagagcattgcgccgtttgtaaagaagcttttgttttaggctccgaagcacgtgaaatgccgtgtaaacacatctaccataccgactgtattctgccgtggttgtcgctacgcaattcatgtcccgtctgccggcacgaactgccggctgaatcgccggaaactacaacctccggtgacttcattcgatcgagaaatgacgaagaagcgatgggattgacgatatggagacttcccggaggtggattcgccgtgggggagatttgccggcggaagacggggagcggaaagagaacttccggtagtgtatacagaaattga

SEQ ID NO: 60 - protein, 383 aa, Nicotiana benthamiana
MSSSYWCYRCTRFVRVSAGSDVVCPYCDSGFIEAAEASNIGSSPETRRRLNGRPESERGVNMGSRRSRRNRGGDRSPFNPVIVLRSPSETPAGDDEAAGEERSYELYYDDGEGSGLRPLPPTMSEFLMGSGFDRLLDQLAQIEVNGFGRPENPPASKSAIESMPILEIASHHVNTEEHCAVCKEAFVLGSEAREMPCKHIYHTDCILPWLSLRNSCPVCRHELPTESPETTTSGDFVRSRNDEEAMGLTIWRLPGGGFAVGRFAGGRRGAERELPVVYTEMDGGFNNGVPRRIAWRSRRSNTSRNGSGISRIFGNVASFFRRLSPSSQRRRALEIHSSSSDSSGSGFAVFRSRSVSSTSVFSRYLRRSSRTWVPEESNGVTRW

SEQ ID NO: 61 - DNA, 255 bp, Nicotiana tabacum
atgtcttcatcgtattggtgttaccggtgtacgcgatttgttagggtttcagctgggagcgacgttgtttgtccgtactgcgatagtggatttattgaagctgctgaggctagtaatattggatcgtcgccggaaactcgccggagattgaacggccggccagaatcggaacgtggtgtgaacatgggatctcgccggagccggcgtaatcgcggcggagacagatctccgttcaatccggttattgttcttcgt

SEQ ID NO: 62 - protein, 347 aa, Nicotiana tabacum
MSSSYWCYRCTRFVRVSAGSDVVCPYCDSGFIEAAEASNIGSSPETRRRLNGRPESERSVNMGSRRSRRNRGGDRSPFNPVIVLRSPSETLAGDDEAAGEERSYELYYDDGEGSGLRPLPPTMSEFLMGSGFDRLLDQLAQIEVNGFGRPENPPASKSAIESMPILEIASHHVNTEEHCAVCKEAFVLGSEAREMPCKHIYHTDCILPWLSLRNSCPVCRHEIPAESPETTTSGDFVRSRNDEEAMGLTIWRLPGGGFAVGRFAGGRLGAERELPVVYTEMDGGFNNGVPRTIAWRSRRSNTSRNGGGISRIFGNVASFFRRLSPSSQRRRALEIHSSSSDSSRVRI

SEQ ID NO: 63 - DNA, 255 bp, Oryza sativa
atgtcttcatcgtattggtgttaccggtgtacgcgatttgttagggtttcagctgggagcgacgttgtttgtccgtactgtgatagtggatttattgaagctgctgaggctagtaatattggatcgtcgccggaaactcgccggcgattgaacgggcggccagaatcggaacgtagtgttaacatgggatctcgccggagccggcgtaatcgcggcggagacagatctccgttcaatccggttattgttcttcgt

SEQ ID NO: 64 - protein, 386 aa, Oryza sativa
MASSSPSSSSSPPSAAGASSYWCYSCDRFVRAPAPHDDSAVACPDCGGGFLEEMSAPPPRAAYLRRPRAHHANDLRLRRTRRAAAAAAAGDRSPFNPVIVLRRSPAAAGDDDSLAAATSFELFYDDGAGSGLRPLPETMSDFLMGSGFERLLDQLTQIEAGGLARARENPPASKASVESMPTVTIAASHVGADSHCAVCKEPFELGDEAREMPCSHIYHQDCILPWLALRNSCPVCRHEMPTDAARPRPSNAGTEEETVGLTIWRLPGGGFAVGRFAGGRRPEERELPVVYTEMDGGFNNGGAPRRISWGSRQSRSTERSAIRRIFRNVFSCFGRSHSSNSQASSSHSRPELNDASDRSAVFSHGSRSRSTSWRLEDGHADAMVQR

SEQ ID NO: 65 - DNA, 255 bp, Populus trichocarpa
atggcttcttcctccccttcctcctcctcctcccccccttccgccgccggtgcctcctcctactggtgctacagctgcgaccgcttcgtgcgcgcccccgccccccacgacgactccgccgtcgcctgcccggactgcggcggcggcttcctcgaggagatgagcgcgcccccgccgcgcgccgcctacctccgccgcccgcgcgcgcaccacgccaacgacctgcgcctgcgccgcacgcgccgcgccgcggcg

SEQ ID NO: 66 - protein, 311 aa, Populus trichocarpa
MASSIESSFWCYRCNRSIRLPTQDSILCPDCGGGFIEEIGITRPHHRLTAAHRTRLRTGGDHSPFNPVIILRGATTDLASGNFELYYDDGAASGLRPLPASISELLMDSGFERLLDQLTQMEINGVGRFDHPQASKAAIESMPVIKILNSHVSMESQCAVCKEAFEINTEAREMPCNHIYHSDCILPWLSIRNSCPVCRHELPTETGSGSGRNSPESDEETVGLMIWRLPGRGFAVGRFSGGRRAAERELPLVFTEMDGGFNNAGLPRSISWAPDGRRSRESGGVGRAFRNFFSFFRRIGRRSSNHSGQRA

SEQ ID NO: 67 - DNA, 255 bp, Populus trichocarpa
atggcttcatcaatcgagtcctcattctggtgctacagatgcaaccgatccatccggctccccacccaagattcaattctctgccccgactgcggcggcggattcatcgaagaaatcggcatcacccgtccccaccaccgactcaccgccgcccatcgcacccgtctccgtaccggcggagaccactctcccttcaatccagtcatcatcctccgcggtgccactaccgacttagcatccgggaacttcgagctt

SEQ ID NO: 68 - protein, 474 aa, Populus trichocarpa
MSSPTTPSFWCYGCSRFVQVWRQDSLTCAECESGFIEEIENPPHVIQTEISSDRHRRFSPAAGTMFMIGNRSNPHNRNRRGGGAGSGDRSPMNPVILLRGGAGGAADDVVGDDGGRGGGGFELYYDDGGGSGLRPLPPSMSEFLLGSGFERLLDQLAQIEINGGFGRYENQHPPASKSAIESMPTVIVNESHIFTESHCAVCKEAFELESEAREMPCKHIYHTDCILPWLSIRNSCPVCRRELPSGDDDGGDGDNGVVSPLPEAGNGQGNNEEEAVGLTIWRLPGGGYAVGRFTGARRGERELPVVYTEMDGAFNNGGLPRRISWGSRGGGRRENGGGGSGGNRRLGFGRVLRHWFACFGTGQSSNLDSRVTGSSRPYSVFSSSSSMRRRDWAREINSARRRCLLLKCIYGDLRMTPIASSIHNLSKTDGLMNCGGTMQSQQMTCEEALGARQTCAVKVEPGIRIICLAQLELQ

SEQ ID NO: 69 - DNA, 255 bp, Poncirus trifoliata
atgtcttcaatcggattgtcgtactggtgctaccgctgcaaccggatcatccggattcaggccaggaccgaagacgcaatcgtttgccccgattgccataccggttttattgaacagattgaaaccattcagcgaccttcgaacgagagatatcccgccgccgaaatgtacttagacgacacccaaaatccggagacattcccgaccacgaggtttggtcggactcggagaaacggcggagaccgatcccctttc

SEQ ID NO: 70 - protein, 374 aa, Poncirus trifoliata
MSSIGLSYWCYRCNRIIRIQARTEDAIVCPDCHTGFIEQIETIQRPSNERYPAAEMYLDDTQNPETFPTTRFGRTRRNGGDRSPFNPVIVLRGPQIPDSGGGNEGTAMERGNFELFYDDATGAGLMPLPASMSDFLMGSGFDRVLDQLTQLDFNGVTRFVNPPASKAAIESMPVVTIAESHVAKESHCAVCKEPFQLNSEAREMPCKHIYHGECILPWLSMRNSCPLCRRELPNEANDRGRSVGGGPDETLGLTIWRLPGGGFAVGRFNGSRRAAERELPVVFTEMDGGFNAPIGAPRRISWVPSRRRAREGNGFARAFRGFTSLLGRIRLPTSRATAEFNRRSPFLDVIYGRSSETATANYFSQFHVGGRRLY

SEQ ID NO: 71 - DNA, 813 bp, Ricinus communis
atggctgcttctataggatcgtcgtctttctggtgctacagatgcaaccgctttatcagagttagggttccatcaattcaagattcaatctcttgtcccgattgcggcgggggatttatagaagaaatcgggactccttctcactcccctcttcaccaccaccaccgtcgattccctaataattcggatcatagactccggcgcagcgccgatcgctctcctttcaaccccgtcatcgtcctccgtggacctccagccgcaaattccagcaacttcgagctttactatgacgacggcgctggctccggcctccgtcctttgccgtcgagtatttcggagttcttgatggggtcagggtttgaccggcttcttgatcagttgactcaattggaaatcaacggcgtaggtggattggagcagtcgcctgcttcaaaaacggcgattgaatctatgcctgtgattaatataatttcggatcacgtctctatggaatctcattgtgcagtttgtaaagaagcatttgagattaacacagaggcgcgggagatgccatgtaagcatatttatcactctgattgtatccttccttggttatcgttgcgtaattcttgtccagtttgtcgacacgagttgcccacagacgtgcgaaatggcagtggaaatgggatgacttcgccggaagcaagtgaggggttaaccatatggagactgccaggtggaggttttgctgttgggaggtttagtggaggaaggagagcggcggagagggagcttcctgtagtgtttacggaggtagatggcgggtttatatag

SEQ ID NO: 72 - protein, 270 aa, Ricinus communis
MAASIGSSSFWCYRCNRFIRVRVPSIQDSISCPDCGGGFIEEIGTPSHSPLHHHHRRFPNNSDHRLRRSADRSPFNPVIVLRGPPAANSSNFELYYDDGAGSGLRPLPSSISEFLMGSGFDRLLDQLTQLEINGVGGLEQSPASKTAIESMPVINIISDHVSMESHCAVCKEAFEINTEAREMPCKHIYHSDCILPWLSLRNSCPVCRHELPTDVRNGSGNGMTSPEASEGLTIWRLPGGGFAVGRFSGGRRAAERELPVVFTEVDGGFI

SEQ ID NO: 73 - DNA, 255 bp, Ricinus communis
atgtcgtcggcgacagcaacgacgtcgtattggtgttacagatgcactcgctttatctccgttctaccctcggaagaaaacaccgatatctcgtgtcctcactgtgacggtggattcatcgaagagatcgaaacaagcaattctcagtctgacaaccctcatcgtcggttcatgtacatgctacctgagaataacaacaacaataatagtagtggcagtagaagaagccgacacggtctgggtcggatcccgact

SEQ ID NO: 74 - protein, 411 aa, Ricinus communis
MSSATATTSYWCYRCTRFISVLPSEENTDISCPHCDGGFIEEIETSNSQSDNPHRRFMYMLPENNNNNNSSGSRRSRHGLGRIPTLRFRRNNGDRSPFNPVIVLRGSTASPEENSEEGGNNSSYEFYYDDGSGSGLRPVPASMSEFLMGSGFDRLLEQLAQIEVNGFGRVGNPPASKAVVESMPIVDVTDAHVAAEAHCAVCKEAFELGSEAREMPCKHIYHSDCILPWLALRNSCPVCRFEMPTDVESSDNSGNSNNNINSTEESEEIVGLTIWRLPGGGFAVGRFTGGRRGGGEREFPGVFTEMDGGFSGGNAPPRRVSWVSRSSRGRESSGSGGGGSGFGLRRVFRGLVSLVRRIGSNSSSTSRTSPDSEMGSISRSNSSHSSSGFGRYVSRRRRGLDLEVENGTDRW

SEQ ID NO: 75 - DNA, 255 bp, Ricinus communis
atgtcatcgccacctacgacgccgtattggtgctacaggtgcagccgttttgttcaagcatcatggaggagacaagaacaagaagaagaaataacttgcccagattgtgcatctggatttcttgagcaactcgaaattcaagaaaacgcagccgccgccgcagatgctgggcggagattccattctccatctgcttcttccgctgctatgttgatggtaggtacccttccagctgcagataataactctcttcgt

SEQ ID NO: 76 - protein, 388 aa, Ricinus communis
MSSPPTTPYWCYRCSRFVQASWRRQEQEEEITCPDCASGFLEQLEIQENAAAAADAGRRFHSPSASSAAMLMVGTLPAADNNSLRRTRRNAGDRSPINPVILLRGGGGGESDSGLELYYDDGSGSGLIPLPPSMREFLLGSGFDRLLDQIEINGLVRYEQPPASKSAIESMPTVIINEMHTSTESHCAVCKEAFELDSEAREMPCKHIYHNECILPWLSIRNSCPVCRHELPADGDVNEENHNNDNNSNEAAVGLTIWRLPGGGYAVGRFSDQLPVVYTEMDGGFNSGGLPRRISWGPRGDGGGGGRGGVGGGGGGGGGAWFGLGRALRHWFACFGGGGGGVASNSDSRIRRRRRSRSVSVSNNNVSSTSSRRRRVWDVEISDGRTRS

SEQ ID NO: 77 - DNA, 255 bp, Ricinus communis
atggctgcttctataggatcgtcgtctttctggtgctacagatgcaaccgctttatcagagttagggttccatcaattcaagattcaatctcttgtcccgattgcggcgggggatttatagaagaaatcgggactccttctcactcccctcttcaccaccaccaccgtcgattccctaataattcggatcatagactccggcgcagcgccgatcgctctcctttcaaccccgtcatcgtcctccgtggacctcca

SEQ ID NO: 78 - protein, 356 aa, Ricinus communis
MAASIGSSSFWCYRCNRFIRVRVPSIQDSISCPDCGGGFIEEIGTPSHSPLHHHHRRFPNNSDHRLRRSADRSPFNPVIVLRGPPAANSSNFELYYDDGAGSGLRPLPSSISEFLMGSGFDRLLDQLTQLEINGVGGLEQSPASKTAIESMPVINIISDHVSMESHCAVCKEAFEINTEAREMPCKHIYHSDCILPWLSLRNSCPVCRHELPTDVRNGSGNGMTSPEASEGLTIWRLPGGGFAVGRFSGGRRAAERELPVVFTEVDGGFNNSNSNNNNNAGGAPRRISWAPSGRRSREGTGGFGRAFRSFFSFFGRIGRRVSDESGFNRTRSRANSIVDRSSRRDTSLWVMHDNRW

SEQ ID NO: 79 - DNA, 255 bp, Sorghum bicolor
atggcgacgccgtcctccccctccccgacccactccccgacctcctcctcctcctcctactggtgctaccagtgcgaccgcttcgtgcgggccaccgccgctcccgcctccccagcctgcccttcctgcgggggcggcttcctcgaggagatgggcgcgccaccaccaccacgaccagcctacctccgtcgccaccgcgcgcacaaccaccaccaccaccaccaccaccaccaccaccacatcgccgccgcagca

SEQ ID NO: 80 - protein, 413 aa, Sorghum bicolor
MATPSSPSPTHSPTSSSSSYWCYQCDRFVRATAAPASPACPSCGGGFLEEMGAPPPPRPAYLRRHRAHNHHHHHHHHHHHIAAAAADLRPRRARRGASGSTDSRASPFNPVIVLRRSPPTTAADGSSSPTATAGGSTFELFYDDGAGSGLRPLPDSMSDFLMGSGFERLLDQLAQIEAGGLAAARARDAPPASKAAVESMPVVSVGASHVAADAHCAVCKEAFELGAEAREMPCAHIYHADCILPWLAIRNSCPVCRHEMPTDATPRAAANAGAAGEEEEATVGLTIWRLPGGGFAVGRFAGGRRPEERELPVVYTEMDGGFNSGGAGAPRRISWGSRQTASTDRGTVRRFLRNVFACFGGRGSAASRSHAMPELDDDDASDHSAAFSRGGSRSRSTSWRLEDGHAADAMVQR

SEQ ID NO: 81 - DNA, 714 bp, Solanum tuberosum
atgtcttcgtactggtgttaccggtgtacaaggtttgttagaatttcagttgggaacgatgttgtttgtcctcactgtgatagtggatttatagaagttgatgaggcaaatattgcgtcgccggaatctcgccggaggtttcccatgtggaaccaacggccagagtcagatcggagtgtgaacatgggttctcgacggagcaggcgtaatcggggagatagatctccgtttaatccggttattgttcttcgtagtccatcggaagctcctggggaggatgaagctgctgcagctgcagaggagcggagttacgagctttattatgatgatggtgaaggttcaggtctcaggccgttgccgccgacgatgtcggagtttttgatgggatctgggtttgatcggttacttgatcagttagcacagatcgaggtgaacggttttggtcggccggaaaatccaccggcgtcgaaatcagcgattgaatcgatgccgattattcaaatagcttgtactcacgtaaattctgagacccattgcgctgtttgtaaagaagctttcgatttaggatctgaagctcgagaaatgccctgtaaacacatctaccattccgattgtattcttccatggctatctcttcgaaattcgtgccccgtttgccgacacgaattaccggcggaatcaacggaaacttacaaactccgacaacattgctag

SEQ ID NO: 82 - protein, 237 aa, Solanum tuberosum
MSSYWCYRCTRFVRISVGNDVVCPHCDSGFIEVDEANIASPESRRRFPMWNQRPESDRSVNMGSRRSRRNRGDRSPFNPVIVLRSPSEAPGEDEAAAAAEERSYELYYDDGEGSGLRPLPPTMSEFLMGSGFDRLLDQLAQIEVNGFGRPENPPASKSAIESMPIIQIACTHVNSETHCAVCKEAFDLGSEAREMPCKHIYHSDCILPWLSLRNSCPVCRHELPAESTETYKLRQHC

SEQ ID NO: 83 - DNA, 255 bp, Vitis vinifera
atgatggctgcgagtggatcttcattttggtgttacagatgcaacaggttcatcagggtttgggctcaagatgcaatcctatgtcctgattgcggttcaggattcgtggagcaaatcaacaatctctctcgatctccacggcgtcgtcgacttccaggatcggcaatgtacctcgaaaataggaatgctttggatcaggatccggttcctagaattcgccgggccaggaggagtggaggtgatcggtcgcttttc

SEQ ID NO: 84 - protein, 361 aa, Vitis vinifera
MMAASGSSFWCYRCNRFIRVWAQDAILCPDCGSGFVEQINNLSRSPRRRRLPGSAMYLENRNALDQDPVPRIRRARRSGGDRSLFNPVIVLRGSADVNGSEGGGTSGERGNFELYYDDGTGSGLRPLPASVSEFLMGSGFDRLLDQLAQLEINGAGRCEHPPASKAAVESLPTIKIVASHVLSESHCAVCKEPFELDSEARELPCKHIYHSDCILPWLSLRNSCPVCRHELPTDSHEGGSSGHLQSPEDNVGLTIWRLPGGGFAVGRFTGGRQAAERELPVVFTEMDGGFNPSGASRRNPWVASGIRSREGGGFGRVMRNFLSVFGRFRISSSRSSQETGSRQGSHPETVFERSSRRHNQS

SEQ ID NO: 85 - DNA, 255 bp, Zea mays
atggagatgccttcctccccttcccccacacgccttccaacggcctcctcctcctactggtgctaccagtgcgaccgcttcgtgcgcgccgcctccccgctctcctcccccgcctgcccctcctgcggcggcggcttcctcgaggagatgagcgcgccgccgccacgaccggcctacctccgccgcccccgcgcgcaccacgccgccgactcccgcgcggcctcgcccttcaaccccgtcatcgtgctccgccgc

SEQ ID NO: 86 - protein, 350 aa, Zea mays
MEMPSSPSPTRLPTASSSYWCYQCDRFVRAASPLSSPACPSCGGGFLEEMSAPPPRPAYLRRPRAHHAADSRAASPFNPVIVLRRSPPAAASFELLYDDGAGSGLRPLPETMSDFLMGSGFQRLLDQLAQIEAAGGLAAGARDAPPPASKAAVQAMPVVSVAAADAHCAVCKEAFHLGAEAREMPCAHIYHADCILPWLALRNSCPVCRHQMPTDANPLEQQQEEEATVGLTIWRLPGGGFAVGRFAGGRTPEERELPVVYTEMDGAGFNSGRAPRRVSWGSRQAASTNRGTVRRFLRNVFACFGRGHASSSSRSHAVPELNDDAFSHGSRSRSTSWRLEDGHADATVQS

SEQ ID NO: 87 - DNA, 255 bp, Zea mays
atggcgatgccttcctccccttcccccacacgccttccaacggcctcctcctcctactggtgctaccagtgcgaccgcttcgtgcgcgccgcctccccgctctcctcccccgcctgcccctcctgcggcggcggcttcctcgaggagatgagcgcgccgccgccacgaccggcctacctccgccgcccccgcgcgcaccacgccgccgactcccgcgcggcctcgcccttcaaccccgtcatcgtgctccgtcgc

SEQ ID NO: 88 - protein, 350 aa, Zea mays
MAMPSSPSPTRLPTASSSYWCYQCDRFVRAASPLSSPACPSCGGGFLEEMSAPPPRPAYLRRPRAHHAADSRAASPFNPVIVLRRSPPAAASFELLYDDGAGSGLRPLPETMSDFLMGSGFQRLLDQLAQIEAAGGLAAGARDAPPPASKAAVQAMPVVSVAAADAHCAVCKEAFHLGAEAREMPCAHIYHADCILPWLALRNSCPVCRHQMPTDANPLEQQQEEEATVGLTIWRLPGGGFAVGRFAGGRTPEERELPVVYTEMDGAGFNSGGAPRRVSWGSRQAASTNRGTVRRFLRNVFACFGRGHASSSSRSHAVPELNDDAFSHGSRSRSTSWRLEDGHADATVQS

SEQ ID NO: 89 - DNA, 255 bp, Zea mays
atggccatgccgtcctcccgctccccggcgccgccgccaacggcctcctcctcctactggtgctacatgtgcgaccgcttcgttcgcgccgccgcttcctcctcctcctcacccacttcgccgtcctcctcctcccccgcctgcccgtcctgcggcgggggcttcctcgaggagatgggcgcgccgccgccccgcgcccgccggccccgccgcgccgcccgccgcggcgccgactcccgcgcctcgcccttcaac

SEQ ID NO: 90 - protein, 379 aa, Zea mays
MAMPSSRSPAPPPTASSSYWCYMCDRFVRAAASSSSSPTSPSSSSPACPSCGGGFLEEMGAPPPRARRPRRAARRGADSRASPFNPVIVLRRSPPADADADGSSSPAAATGSSFELFYDDGAGSGLRPLPESMSDFLMGSGFERLLEQLAQMEAGGGLAARARDAPPASKAAVDSMPALRVGAAHVAADAHCAVCKEAFELGAEAREMPCAHIYHADCILPWLALRNSCPVCRHEMPADNAAPRAAAAAAADEDARVGLTIWRLPGGGFAVGRFAGGPRPDERELPVVYTEMESGFNFNSGHAPRRISWGARQAAATDRGTVRRFLRSVFACFGRGHAPSASRSHAVPELNNDAFSHGSRSRSTSWRLEDGHADATVQS

SEQ ID NO: 91 - DNA, 255 bp, Zingiber officinale
atgccttcttccatggcgacggcgttgtcgtactggtgctaccggtgtagccgcttagtgagggtgtggcctgagggcgccatcgtctgccccgactgcgacgggggtttcctcgaggaggtgggcgcctcccctcctccccgccgccgtttccccccaggcagctttggggcgtctgccgcagcagctcccagatctcgtccttttgccgacctcaggtttcgccgcaaccgccgcggcgcttccggagaccgc

SEQ ID NO: 92 - protein, 365 aa, Zingiber officinale
MPSSMATALSYWCYRCSRLVRVWPEGAIVCPDCDGGFLEEVGASPPPRRRFPPGSFGASAAAAPRSRPFADLRFRRNRRGASGDRSPFNPVIVLRGSSGGGERDVDGAAAGGFELYYDEGTGSGLRPLPESISDFLMGSGFDRLLEQLAHLEINGVGRIRGNEHPPASKAAIESMPTVEIVKGHIDIDCHCAICMDAFELGTEAREMPCKHIYHQDCILPWLSLRNSCPVCRSEMPAEVPGQATTGPAALDNEHTDAAASPAASGNEEETVGLTIWRLPGGGFAVGRFAGSRRTTEEREFPAVYTEMDGGFNNNGAPRRVSWTSGGRRSRERGGIGRAIRSFFSFFRRPQRVSSPRLSSEYSSPA

SEQ ID NO: 93 - DNA, 56 bp, Artificial sequence
  primer: prm10911
ggggacaagtttgtacaaaaaagcaggcttaaacaatgaattctgaatcctcaccc

SEQ ID NO: 94 - DNA, 53 bp, Artificial sequence
  primer: prm10912
ggggaccactttgtacaagaaagctgggtacaatagaatcaatcttccaattc

SEQ ID NO: 95 - DNA, 2194 bp, Oryza sativa
aatccgaaaagtttctgcaccgttttcaccccctaactaacaatatagggaacgtgtgctaaatataaaatgagaccttatatatgtagcgctgataactagaactatgcaagaaaaactcatccacctactttagtggcaatcgggctaaataaaaaagagtcgctacactagtttcgttttccttagtaattaagtgggaaaatgaaatcattattgcttagaatatacgttcacatctctgtcatgaagttaaattattcgaggtagccataattgtcatcaaactcttcttgaataaaaaaatctttctagctgaactcaatgggtaaagagagagattttttttaaaaaaatagaatgaagatattctgaacgtattggcaaagatttaaacatataattatataattttatagtttgtgcattcgtcatatcgcacatcattaaggacatgtcttactccatcccaatttttatttagtaattaaagacaattgacttatttttattatttatcttttttcgattagatgcaaggtacttacgcacacactttgtgctcatgtgcatgtgtgagtgcacctcctcaatacacgttcaactagcaacacatctctaatatcactcgcctatttaatacatttaggtagcaatatctgaattcaagcactccaccatcaccagaccacttttaataatatctaaaatacaaaaaataattttacagaatagcatgaaaagtatgaaacgaactatttaggtttttcacatacaaaaaaaaaaagaattttgctcgtgcgcgagcgccaatctcccatattgggcacacaggcaacaacagagtggctgcccacagaacaacccacaaaaaacgatgatctaacggaggacagcaagtccgcaacaaccttttaacagcaggctttgcggccaggagagaggaggagaggcaaagaaaaccaagcatcctccttctcccatctataaattcctccccccttttcccctctctatataggaggcatccaagccaagaagagggagagcaccaaggacacgcgactagcagaagccgagcgaccgccttctcgatccatatcttccggtcgagttcttggtcgatctcttccctcctccacctcctcctcacagggtatgtgcctcccttcggttgttcttggatttattgttctaggttgtgtagtacgggcgttgatgttaggaaaggggatctgtatctgtgatgattcctgttcttggatttgggatagaggggttcttgatgttgcatgttatcggttcggtttgattagtagtatggttttcaatcgtctggagagctctatggaaatgaaatggtttagggatcggaatcttgcgattttgtgagtaccttttgtttgaggtaaaatcagagcaccggtgattttgcttggtgtaataaagtacggttgtttggtcctcgattctggtagtgatgcttctcgatttgacgaagctatcctttgtttattccctattgaacaaaaataatccaactttgaagacggtcccgttgatgagattgaatgattgattcttaagcctgtccaaaatttcgcagctggcttgtttagatacagtagtccccatcacgaaattcatggaaacagttataatcctcaggaacaggggattccctgttcttccgatttgctttagtcccagaattttttttcccaaatatcttaaaaagtcactttctggttcagttcaatgaattgattgctacaaataatgcttttatagcgttatcctagctgtagttcagttaataggtaatacccctatagtttagtcaggagaagaacttatccgatttctgatctccatttttaattatatgaaatgaactgtagcataagcagtattcatttggattattttttttattagctctcaccccttcattattctgagctgaaagtctggcatgaactgtcctcaattttgttttcaaattcacatcgattatctatgcattatcctcttgtatctacctgtagaagtttctttttggttattccttgactgcttgattacagaaagaaatttatgaagctgtaatcgggatagttatactgcttgttcttatgattcatttcctttgtgcagttcttggtgtagcttgccactttcaccagcaaagttc

SEQ ID NO: 96 - DNA, 933 bp, Populus trichocarpa
atggaggatctgtacggagcggcagcggctactgagccggaagaaatctcgactttccttcatcaactcctccacaacaactcttcttccccttctaaattcatgcatcatgccctctctaccccagtggagaatggcgtggaattgttagatcgccaccggttttctgagacggagtgtggtgctggtgttaatttctctgatcctgatggttattatgctaaagaaggcgtgggaaatgcggtcgtttcaaagaggggaggagtctctgtggaggatgatctaggtgattttagctgcgatagtgagaagggggtggaggtgcaagctaatacagcgcggccgcgaagttcgtcgaagaggagtagagctgcggaggttcataatttatctgaaaagaggaggaggagtaggatcaatgagaaaatgaaagcattacagaatttaattcctaattctaataagacggataaggcttcgatgctggatgaggccattgaatacttgaagcagcttcagcttcaagtgcagatgctaacaatgagaaatggattgagtttgcacccgatgtgcttaccaggagcactacagccaatgcagctgcccttgtcaggaatgagctttgatgaagggattggattgttaactaccaatacattaacaggcatattttctgcaaatgaagaaagctcagagcaaaattctcttaatcttccaacccagtgcactatctcaaatcaaccaatcactattccttcagggacaaatattacctcatcagaaaccaacttcggttttgaaccacagatccatgttaaccatgcacctttcaatctgtccacgtcttcaaaggaaatctgcagggaaggcacaccacaggcaaagctagagatgaatcaaactacgaagacctccccatctggtgtggcctag

SEQ ID NO: 97 - protein, 310 aa, Populus trichocarpa
MEDLYGAAAATEPEEISTFLHQLLHNNSSSPSKFMHHALSTPVENGVELLDRHRFSETECGAGVNFSDPDGYYAKEGVGNAVVSKRGGVSVEDDLGDFSCDSEKGVEVQANTARPRSSSKRSRAAEVHNLSEKRRRSRINEKMKALQNLIPNSNKTDKASMLDEAIEYLKQLQLQVQMLTMRNGLSLHPMCLPGALQPMQLPLSGMSFDEGIGLLTTNTLTGIFSANEESSEQNSLNLPTQCTISNQPITIPSGTNITSSETNFGFEPQIHVNHAPFNLSTSSKEICREGTPQAKLEMNQTTKTSPSGVA

SEQ ID NO: 98 - DNA, 1511 bp, Arabidopsis thaliana
atgttttagctttaactgctttttttttgttgttggtgtaatgatatcacagagagaagaaagagaagagaagaagcagagagtgatgggagataagaaattgatttcatcttcttcttcttcctcggtttacgatactcgtatcaatcatcatcttcatcatcctccgtcttcttccgacgaaatctctcagtttctccggcatattttcgaccgttcttctcctttaccttcttactactccccggcgacgactacaacgacggcgtctttgattggtgtgcacgggagcggtgacccacatgcagataactcgagaagtctcgtttctcatcatccaccgtcagattctgtgcttatgtcgaaacgtgtcggagatttctctgaggttttaatcggcggaggatcaggctcagccgccgcgtgttttggtttctccggtggtggtaataataacaacgttcaaggaaatagctctgggactcgagtatcgtcttcttccgttggagctagtggcaacgagacagatgagtatgactgtgaaagcgaggaaggaggagaagctgtagttgatgaagctccctcttccaagtcaggtccttcttctcgtagttcatctaaaagatgcagagctgctgaagttcataatctctctgagaagaggaggagaagtagaattaatgaaaaaatgaaagctttacaaagtctcatccctaattcaaataagacggataaggcttcaatgcttgatgaagccattgagtatctgaaacagcttcagctccaagttcagatgttgactatgagaaatggaataaacttgcatcctttgtgtttacctggaactacattacacccattgcaactctctcagattcgaccccctgaagcaaccaatgatcctctgcttaatcataccaatcagtttgcttcgacttctaatgcaccggaaatgatcaatactgtggcttcttcatacgctttggaaccttctattcgcagtcactttggacctttccctctccttacttcacccgtggagatgagtcgggaaggtgggttaactcatccaaggttgaacattggtcattccaacgcaaacataaccggggaacaagctctgtttgatggacaacctgacctaaaagatcgaattacttgaacagtgtcccaacttcgggatctctatgtgttcttgtttcttagaacgcaagccataaagctgtctgacaatggagatgcatttaactgtctttattttttctaaggttctatttaaaatcaattgttggtgacacgaattctagagtctaatcttttggatctaatagctatatataaaaaggactgaaattttattacaaagtaattgactaattgttagattgttgtatgtttatggtggatgtaaattttctagatcatcttcgtattgtatttgagagtttgatactcgatggctttggatatgtaaattaccccgataagcttctagagaagttttcgattct

SEQ ID NO: 99 - protein, 373 aa, Arabidopsis thaliana
MISQREEREEKKQRVMGDKKLISSSSSSSVYDTRINHHLHHPPSSSDEISQFLRHIFDRSSPLPSYYSPATTTTTASLIGVHGSGDPHADNSRSLVSHHPPSDSVLMSKRVGDFSEVLIGGGSGSAAACFGFSGGGNNNNVQGNSSGTRVSSSSVGASGNETDEYDCESEEGGEAVVDEAPSSKSGPSSRSSSKRCRAAEVHNLSEKRRRSRINEKMKALQSLIPNSNKTDKASMLDEAIEYLKQLQLQVQMLTMRNGINLHPLCLPGTTLHPLQLSQIRPPEATNDPLLNHTNQFASTSNAPEMINTVASSYALEPSIRSHFGPFPLLTSPVEMSREGGLTHPRLNIGHSNANITGEQALFDGQPDLKDRIT

SEQ ID NO: 100 - DNA, 1246 bp, Brassica napus
aaaaaaaaaagaagagataatgggagataataagaaactgatttcatcttcttcttcttcaactaatacctcgatttacgacactcgtggtaataatagtaacaatcatcatcatcatcatcctccgtcatcttccgacgagatttctcagtttctccggcatattttcgaccgttcttctcctttaccttcttactactctccggccatgaccacgacgacttccacggcggcgataggtgttcagggagacccgcatgcagacaacccgagaagcttcgtttctactacaccggcgtcgaagcgcgccgttgatttctccgacgttttgatcggctccgccgccgccgccgccgggtgttatggtttccccggcggtggtaacaacattgctcaagggagcagctcggggactcgtgtttcgtcttcttccattggagctagcgggaacgagaccgacgagtatgactgcgaaagcgaggaaggagtagaagctgtggttgatgatgagcttccctcgaagtctcgtaactcatctaagaggtgcagagctgctgaagttcataatttgtctgaaaagaggagaagaagtagaatcaatgaaaaaatgaaagctttacaaagtctcatccctaattcaaataagacggataaggcttcgatgcttgatgaagccatagagtatctgaaacagcttcagctccaagttcagatgttgacaatgaggaatgggctaaacttgcatcctttatgcttacctggaacttcattacacccactgcaactctcacagatccgacctccagaaacaagcaatgatcctctgcttaaccactccaaccaatatgcttcgacttctaatggccggatatgatcaacatgccttccgcgtacacaatggaaccttccatccgcagtcactttggaccttttccccacttcactccacctgtggagatgagtcgagaaggcgggttaactcatcagaggttgaacactagtggagaacatgctgcgtttgatggacaacatcctgagataaaagatcgacttacttgaacctcattctcagtttggggggctctatgcgttcttgtttcttaggtcgcaagcaacgaagctgcatgacaatgaaaatgcatttagcgtcttttatatttttataattctctatatctttgttgttgttaacatgaattctagagactagtcattggacctactagatattatataaaagaagact

SEQ ID NO: 101 - protein, 284 aa, Brassica napus
MGDNKKLISSSSSSTNTSIYDTRGNNSNNHHHHHPPSSSDEISQFLRHIFDRSSPLPSYYSPAMTTTTSTAAIGVQGDPHADNPRSFVSTTPASKRAVDFSDVLIGSAAAAAGCYGFPGGGNNIAQGSSSGTRVSSSSIGASGNETDEYDCESEEGVEAVVDDELPSKSRNSSKRCRAAEVHNLSEKRRRSRINEKMKALQSLIPNSNKTDKASMLDEAIEYLKQLQLQVQMLTMRNGLNLHPLCLPGTSLHPLQLSQIRPPETSNDPLLNHSNQYASTSNGRI

SEQ ID NO: 102 - DNA, 2513 bp, Carica papaya
gttcaagttaaaaattgcattgagaaattgatgaattccccatttgaattagctttggaacctttttaatattattccaattactttattgtttattttctgatgcgcgccatcattataattttatttctatttagaggagtatgataattttattgactctatatgataatgcaggggaattatattgatagtggggggcgattttgtgttgtaaattttttttttttttaaaatattttttttagtaaaaaataaaaaattattaaatagttgttgtaaatatagcattatttatttattttatttgattgttttatttattataattatttatttatttattttttttgttgggttcgcgtctcagtcccatttccatttgactgagaaaagagttagcaaagcacagagggtgttgctaacacgctaccaaaaaactgacatcgggaattgcattttttatttatcttttttttaattaatgctgagttttcagaccaagctgacgtttggtttagataagaaactcacccctcaaatttctttcttttttgactttttcaccccttaaatttcaagaatcaaagtgcccaaaatcaaattgaaaataactccttctcccctgacatttattctacattttcattcacatccctaaaagtatttggactgaaatttcactcttcctcctttgagggtttaattgaaaaataaatagattcggaggggcgctcgtgcaagaaaatataaaatatatgaggtgggtttggtctaacggaaaagagaaggaaaaccataattaaggcgggagattaatcaactccggattaaatagacgtcttcataaaaaccttaaaccccttcattaaaaacagcgaaagccaacaaacacagcacagaaaaagagacccgaagaaaagaacagagccatcccaagaagaaaaagcagaaaactttcaaacacagacggtttcttttttgcataaatttgagatgcaaacaaaacccacctgctgatccttcttcaaacgccttccctctccctttctctccttcctttctttcatttccctgctctttcatggcggatctgtacggagcagctccgtcttctaccgctcctccagagcacgaggccgaggaaatctccacattcatcacccaattcctcaacacctcctcttcttcttcttccgcccactgcatgcccttcaaacccaaatacgtccactctttctcttctccgccaccgccggcagccaatcccggtcccctcttaatggaagatcgccgctggttcgctggatcgatgggtctccccgagtcggagtgccgagttagggagggcaactctggagctgttgttgacacgtcttcctccggtatcaatttctccgatcctcaagggtacctcggaaccaatgtgaaggagagaacggagaatactttctcgtctgtcgctcacttgagctgtgacaccgaggggccagatgtgtcggagttgccggcaaatcgaattccggctagaacttcatctaagaggagcagagctgcagaggttcataacttgtcagaaaagaggaggaggagtaggattaatgagaaaatgaaggctttacagaacctaatcccaaattctaacaagacggataaggcttcaatgctggatgaggcaattgagtatttgaaacaactccagcttcaagtgcagatgttatcgatgagaaatgggctgagtttgtatccagtgtgcttacccggagttctacagcctatgcaactgcctcctacaggaatgggttaccacgatgatggtggactgttgaattctgctccaggagcaggcacaatatcagccaatgaagaaagctctgtgcagactgcgtatattctccccagccaatgtgctagctcaagccagtccatcgcaataccttcagtgacaaacatcaatgctttggaaacttcatttggatttgaaccgtcaattcaggcgaactatggaccatttaacctcaccccaacttctgaggaaatctgcaaagagggcaaactagaactgccattagacgcaaatcgtgctgggaacagctcatccggtgtgtcttagcaaaaccgggaaccccacaagacaggatgtgtagaattgagaccaccatgtctaacaccatagacagtgcaaatgataattgaagctgctgatagttgtcattttgtgttgtaagtgaaacaagtagacaatttggatttcaagtttcaagctgttgatatcccttgacttacaggaaaaaagaaaaaaaaaaaaaatattcccaaggtttttggtgttttatccagagaaaaaaaaaaaaaaaaggccgcctcggccctcgagaagctttctagaccattcgtttggcgcgcgggcccagtagtaagtgaacatggtcatagctgtttcctaggagatcctggtcatgactagtgcttggattctcaccaattaaaaaacgcccggcggcaaccgagcg

SEQ ID NO: 103 - protein, 342 aa, Carica papaya
MADLYGAAPSSTAPPEHEAEEISTFITQFLNTSSSSSSAHCMPFKPKYVHSFSSPPPPAANPGPLLMEDRRWFAGSMGLPESECRVREGNSGAVVDTSSSGINFSDPQGYLGTNVKERTENTFSSVAHLSCDTEGPDVSELPANRIPARTSSKRSRAAEVHNLSEKRRRSRINEKMKALQNLIPNSNKTDKASMLDEAIEYLKQLQLQVQMLSMRNGLSLYPVCLPGVLQPMQLPPTGMGYHDDGGLLNSAPGAGTISANEESSVQTAYILPSQCASSSQSIAIPSVTNINALETSFGFEPSIQANYGPFNLTPTSEEICKEGKLELPLDANRAGNSSSGVS

SEQ ID NO: 104 - DNA, 1133 bp, Citrus clementina
  misc_feature (838)..(838): n is a, c, g, or t
  misc_feature (858)..(858): n is a, c, g, or t
agagagagaaagaaagaaacagcaccccgggggcacaaaaccagaggaagagaaaccgaagcgagagcagcagaaacactctgtctgcgttgcactttactaaatcaaacaaaaccattctctctctgctgatttgttctttccttttccttgtccttttctttttcttttaagtttagttttcgaaaatacaattatcttctgcaaattcatggccgatctgtacggaacaacgccgccaactgccggccacgaaccagaagaaatctcttcatttttaaaccaatttatacacaattcatcgtcgtcgtcgtcttcttgttttttcgctcagccggaggatcgccaccctttcggccgatcggctgacccctctgttctcgactcttcttctgctggtctcaatttctctaatttggtcgtcggtgccgtggactccgataccaatgatagtgagaagggtcctgatgcattggaggtgccatcgaacgacacggttcgaactaaaacgtcgtctaaacggagcagggctgctgaagttcataatctgtcagaaaagaggcggaggagtagaattaatgagaaactgaaagctctacagaacctaattcccaattctaacaagactgacaaagcttcaatgctggatgaggctatcgaatatctcaagcagcttcaactccaagtacagatgttaacaatgagaaatggattgagtttgcacccaatgtggttaccaggagtactaccatctatgcaactgcctcagatgggaatggtatttgatgagggtaatggactgttgaataccgatggaggaaccgaaacattttctgcnaatgaagaaagctcggtgcnaactggttttaatctttccagccaatgtaccatctctgatcagccagttgcccttacttcagcagcaaatattagcacatcagaaactgcatttggacttgaaccactgattcaggctcactatggacccttcactctccccttctcttcccaggaaatctgcattgaaggttgccctcatctgcatttggatattaaatttcaatggaaaagaaactcatctgggcgtggccgtaaaccaaaattctttttcctccaaagaatgtaacggaaag

SEQ ID NO: 105 - protein, 304 aa, Citrus clementina
  misc_feature (216)..(216): Xaa can be any naturally occurring amino acid
MADLYGTTPPTAGHEPEEISSFLNQFIHNSSSSSSSCFFAQPEDRHPFGRSADPSVLDSSSAGLNFSNLVVGAVDSDTNDSEKGPDALEVPSNDTVRTKTSSKRSRAAEVHNLSEKRRRSRINEKLKALQNLIPNSNKTDKASMLDEAIEYLKQLQLQVQMLTMRNGLSLHPMWLPGVLPSMQLPQMGMVFDEGNGLLNTDGGTETFSANEESSVXTGFNLSSQCTISDQPVALTSAANISTSETAFGLEPLIQAHYGPFTLPFSSQEICIEGCPHLHLDIKFQWKRNSSGRGRKPKFFFLQRM

SEQ ID NO: 106 - protein, 431 aa, Eschscholzia californica
MADMYDSNKSSSSSFPTRPVLESDDISLFLQHFLHSSSSFERSKLQMPSSSQPFHPPLLSSSSSAQFNEEYLQEDQHPSCLSTGIPNSDFRLSNHNDSCPPPLDSSSNLILSSPNIYFPSGMKENPTIFSENGVAGDSDAAGAGSVKRRKIPVENDLDDYDCESEEGFEASDGPSKTVPCRNSSKRSRAAEVHNLSEKRRRSRINEKMKALQNLIPNSNKTDKASMLDEAIEYLKQLQLQVQMLSMRNGLSLHPLYLPGMLQPLQLPQMRMGFGPEGNAVGPQHMNIGTDTQPVNQDSSTRSSFSLSNQSPTLNQSIVTPNMSNLTHPETSFGLNSSIQLHQGQFPLSSVSEEMYREDVVPSQQLHIGHATRNASECLSFDARASVIHNTNSVDACVLGGSILSQPMLPQQDAVADQNLIQHLHRKKCSTR

SEQ ID NO: 107 - DNA, 918 bp, Fragaria x ananassa
gtttctgaaacagagcaataggaatgggggatacattcgagtacaattaccaaaacaacagctcctgttcatcttcagctcctgcttcttcggtctcagttgctcagagtcattcgtccacggacgaaatctctctttttctgcagcaaatattggtgcgttcttcgtctttgaccggacagcagttcttattttcgtcttcgccggccggttatgctctgccggaaaatctcggcagtccgagcaatgatagtttcgtgggaggcgtgatcaggggagttgatgtttccacggcggttgtaacggcgagtggtccgaatgtatcttcgtcttcggtcggagctagtgaaaatgaggccgacgagtatgattgtgaaagcgaggagggtcttgaagcattggtagaagaggcggcagtgaaatcaggtggtcgaagttcttcaaagagaagcagagctgcagaagttcataatttgtctgaaaagaggaggaggagtaggattaatgagaaaatgaaggcattgcagaatctcatcccaaattctaacaagacagacaaggcttcaatgcttgatgaagccattgagtacctcaaacagctccagcttcaagtacagatgttatcaatgagaaatggcatgagtttgcatcccatgtgcctacctggagcgtcgcaattctctcagataagaatggactttggtggtgaggaaaataggcctgtgcatttgaacatgtcaggcatactgaatatgaaccaggatccctcaacacaaaatttgtacaatccaaaccagtccttatgtaccagatttgtcaaatgtagtcaattcagacgatgcatttggattggaagcatctattcaggctcacttgggaccctttcagctcccaaactcatccaagggaatctgcagg

SEQ ID NO: 108 - protein, 298 aa, Fragaria x ananassa
MGDTFEYNYQNNSSCSSSAPASSVSVAQSHSSTDEISLFLQQILVRSSSLTGQQFLFSSSPAGYALPENLGSPSNDSFVGGVIRGVDVSTAVVTASGPNVSSSSVGASENEADEYDCESEEGLEALVEEAAVKSGGRSSSKRSRAAEVHNLSEKRRRSRINEKMKALQNLIPNSNKTDKASMLDEAIEYLKQLQLQVQMLSMRNGMSLHPMCLPGASQFSQIRMDFGGEENRPVHLNMSGILNMNQDPSTQNLYNPNQSLCTRFVKCSQFRRCIWIGSIYSGSLGTLSAPKLIQGNLQ

SEQ ID NO: 109 - DNA, 2897 bp, Glycine max
tcatacatgatttatttttgtttatatttcaatttaaaggtaatattatttttggataagtctttttttcataaaaatatgttctttattatttcattaaatttattgcttgtggtgtgcatggagtaatgtagtttgttcattttcttatcttcattttcctgcaccaaaatattatttcctccttccttaattataacactagtttaaaaaatttatttgatccttctttatatttttttataatttttagatatatttattaggttttcctatatatttttatttaattattctttgactaaacattaataaaaaataattaaaggaataaaaagataaaaaaaataatttaaaaataataatataattaattaacaaatctaatataattaattaaattaattaattatttttaagagtcatgaattaattaaaagattcttctaattaggacggaaggattatcatacaactaaaaatttattggtgaaagtgaactgtattcaattaaacctgaattcaagaagttcacagaatgaactcgtagtattttttattttataataaaacaaccccaactccccaagtaataaaaatagggagtaaaaatagtagaaaaagatgataatgtggttcacgtgccacttccacgcgtagtggagcgtgcaacctcgggactttcactccactttctgacacagcaaaaacagaaacaacaggcctcgtatttgtggtgattaaggttaataatatattctcttctcctcatataccatgtttatttgactcttttaatttattttaaaatacttataaattaaaaaaatataccaatcatttatcaaaaattatttattttttatcataattaacaatttaaaaagcatatttttaatcattattttcaaactattagttaatagatgaaaaaaaatccattaaaaattaaggcaaagttaaaaatcaatgtaataactgatttgattcgttagacattgtcagagtgaaattgaaagaggtaagcttgaagtggaaagtgaagcgttgcgaaaggtgatggcgcgtgatatgcatgacacaaattctgatccaaaaccaaaacccgcccacaattccccatatcatgtccttcttccttttccttttccacaggtttctgaaagtggttgcattaccatttactactttctttctctcttctcaacacacccaaaacaaaacaaaaccaccccaaccccttccactcgcattcttcagtcacacacggaatgggtgacatgtaccactttgacaagaacctctcttcgcaagacgaaatctcactttttctgcgtcagattctgctccgttcatcaccaccttcttcttcttcatcttcccgccccatgcctactgtatcctgcacctctaacgttgctcaccaaaacgtaaatgcacacccttctttcacagcgtcgcagctccaagatgggaagatcttggcccttgattccaccgcttcttttgcctcgggttctgccgcttgcagccccttcaagggccagggtgcttctgctgcaaatgtgtcttcttcgtctgctggagtgagtgagaacgaaaatgatgactatgattgtgaagagggtgttgaggctttggccgaagaagttccaacaaaggctgcttcttctaggagttcatctaaaagatcaagagctgcagaagttcataatttgtcagagaagcggagaaggggtaggatcaacgagaaaatgaaggctttgcaaaacctaattccaaattctaacaagacagataaggcttcaatgctcgatgaagctattgaataccttaaacagcttcagctacaagtacagatgctgtcaatgagaaatgggttgagtttgcatcctatgtgctttcctgaaggcttgcagcctctgcagttgtctcagatgggtatggaattaagtgaaagaaacaggtttacctctttaaacatgtcagctactctgcctctgcaccaagacaacaatcccttgcactatgcatccaatctacctaacaaacacaatctcccaaatcagccatctgtgccctatcctccatacattgacaacccagaaacttctttcggtctggaaccccgaatccaaacggatatgaaacctcttcaacacaaaggaggatcttctgagccaatacgaggggaagacattttgcagcaccagcaatcaagtggtatccattcagatgccaatacattaggtggttctcaagttgtcaaagaattcgaatcaggcacgagactatcattcccttttgacacgcaagcatgtgaacccaaagacaacagcaactcttcgcaaccatgcattggcggaagagatcattcaggagtgatcataagaaatagtgagaccaacattgttggtaggtaggtatatgatgcttatgtgaatgatatgtagctaggttcgtgcatgcaatgcaacatgtcttgaaaagcttttcaccagagactgcagaagggagaaagtggtcagtggcaactcgaagaccgaaaagtcagatttttgaagtttactgccagtaatgccttctgaattttggtttcgtaaaagcaggaatctcaatattatcccttgagcattttgtaatgttctcaaaaagcctctggcctacgtgacatgagagcagatttttttttttttctctttctagcttctcgagttgataaaattatgtatgtataatgtatgcagagaatataactacccattgttatgcggattatataaccactgtagaatatcctatggtggttttatttcagttcacgataaaaacaaattgcctatttttgtgcgtcattttcttaaccgcacacaacgtagcgaaggtcgccattggag

SEQ ID NO: 110 - protein, 383 aa, Glycine max
MGDMYHFDKNLSSQDEISLFLRQILLRSSPPSSSSSSRPMPTVSCTSNVAHQNVNAHPSFTASQLQDGKILALDSTASFASGSAACSPFKGQGASAANVSSSSAGVSENENDDYDCEEGVEALAEEVPTKAASSRSSSKRSRAAEVHNLSEKRRRGRINEKMKALQNLIPNSNKTDKASMLDEAIEYLKQLQLQVQMLSMRNGLSLHPMCFPEGLQPLQLSQMGMELSERNRFTSLNMSATLPLHQDNNPLHYASNLPNKHNLPNQPSVPYPPYIDNPETSFGLEPRIQTDMKPLQHKGGSSEPIRGEDILQHQQSSGIHSDANTLGGSQVVKEFESGTRLSFPFDTQACEPKDNSNSSQPCIGGRDHSGVIIRNSETNIVGR

SEQ ID NO: 111 - DNA, 948 bp, Gossypium hirsutum
gcacgagcctccttcttcttcagatgatatatccaaccttcttcatcaaattctaggtcattcttcttcttattcttcttcgtcttcgtcatcttctggaatggcccactttgggggtccatctgagaatccacggcggttatcaccgtcaccagcaccgcctggtggtggagtgaagcaaggtggagggtggggtttggttgaagctcctggtgagaacgataccgatgagtacgactgtgaaagtgaggagggtattgaagcactggtggatgaggcactaccaaagccagctccacctcgtagttcctcaaaaagaagcagagctgcggaggttcacaatttgtctgaaaagaggaggagaagtaggattaatgagaaaatgaaagcattgcaaaaccttattccaaattctaacaagactgataaggcttcgatgcttgatgaagctatcgagtacttaaagcagcttcagcttcaagttcagatgctatcaatgagaaatggattaagcttgcatccaatgtgcttgcctggagttttgcaaccactacagttttcccaaacaagaatgaacttcggtgaagaaaatggatctctacctatgaacatgtcggatacagtaccagcaaatccggaaacctcggtgcagatggtttttgatctacccaaccaatgcagttcctcaaaccctggatcagtaccaaacatgtcaaacataattacttcggaaacttcatttggattggaatcaatccaggctcattttgggccatttcagctcctctcatcatctcagatatttgcaggaagacattctgcatcatcatcaactgaagacaaacacaccagaatttggtctagctgcaacaaccacagtttcacttccctttgatacacgagaatctgatctaaaggaaagctgttctcttgatgctagtacgatga

SEQ ID NO: 112 - protein, 297 aa, Gossypium hirsutum
HEPPSSSDDISNLLHQILGHSSSYSSSSSSSSGMAHFGGPSENPRRLSPSPAPPGGGVKQGGGWGLVEAPGENDTDEYDCESEEGIEALVDEALPKPAPPRSSSKRSRAAEVHNLSEKRRRSRINEKMKALQNLIPNSNKTDKASMLDEAIEYLKQLQLQVQMLSMRNGLSLHPMCLPGVLQPLQFSQTRMNFGEENGSLPMNMSDTVPANPETSVQMVFDLPNQCSSSNPGSVPNMSNIITSETSFGLESIQAHFGPFQLLSSSQIFAGRHSASSSTEDKHTRIWSSCNNHSFTSL

SEQ ID NO: 113 - DNA, 1035 bp, Medicago truncatula
atggaacataacaacaacaacaacaacatgtcttcttcacaagacgaaatctctctttttcttcatcaaattcttctccgttcatcttcatcttcttccatgccaggatccattaaccagcttcaagatggaaagatctcagcccttgattcaacttctagatcaaaccatgctataaatgtcacttcctcttctgttggagcaggaggaggactcagtggtaatgacactgatgaatatgactgtgaaagtgaggagggtgttgaagcattgattgaagaagttccaacaaagtcagttggtgcttctaggagttcttcaaaaagaagtagagcagctgaagttcataatttgtcagaaaagagaagaaggagtaggatcaatgagaaaatgaaagctttacaaaatctaattccaaattctaacaagactgataaagcttcaatgctagatgaagctattgaataccttaaacagcttcagctccaagtacagatgctgtcattgagaaatggattgagtttgcatcctatgtactttcatgaaggcttgcattctctgcctttgtctcggatgagtacggagttgagtgaaggaaacggttctaatcctttaaatatgacatctactctgcctcatccccaagacaaccccttgctctatccatcaaatctaccaaacaaaaacacattgccgagtcagccatcaatgtcttcctatccttcatatattaacgacacggaaacttctttcggggtggaatctggaatcccagcacagaaagaacgtcttcaacgatcttcagagccaatgcacggcgaagacttgttgcagcaccagcaattgaatgcaataaattcttttaccaatctattaggtggttctcaagttgtcaaagaatttcagtcgggcgcaatggctacatctactactaacaatactttgcaaacttgtgtcgctggaagagatcagtcaggagtggtcatgagaaatagcgagcccaacattatatttacatcgcagttaagtaggtaa

SEQ ID NO: 114 - protein, 344 aa, Medicago truncatula
MEHNNNNNNMSSSQDEISLFLHQILLRSSSSSSMPGSINQLQDGKISALDSTSRSNHAINVTSSSVGAGGGLSGNDTDEYDCESEEGVEALIEEVPTKSVGASRSSSKRSRAAEVHNLSEKRRRSRINEKMKALQNLIPNSNKTDKASMLDEAIEYLKQLQLQVQMLSLRNGLSLHPMYFHEGLHSLPLSRMSTELSEGNGSNPLNMTSTLPHPQDNPLLYPSNLPNKNTLPSQPSMSSYPSYINDTETSFGVESGIPAQKERLQRSSEPMHGEDLLQHQQLNAINSFTNLLGGSQVVKEFQSGAMATSTTNNTLQTCVAGRDQSGVVMRNSEPNIIFTSQLSR

SEQ ID NO: 115 - DNA, 903 bp, Nicotiana tabacum
gataatggaaattaacaagacaagtctctgcccaagaaaaaagttgcacatctttgggaattggctttatctctacttcgactgcctcaagctgaacttgatctttctcactttttaatgctgtgataaaaaaaccgtcttgtttcttctgtatctctatactaatggccaacaacaatatttatcatcacaatgctagaacttctttttctttgactgaacctgacgctgaacctgacgatatttctgtttttcttcgtcatattctcaatcattcatctaattttatgacccatgaaacgcaatattcctcatcgctacctcatcttctgcctaaaaatcagcatggcgagttatcttccgtattgaattcgtcggctggcggcattttctcgtcttcttacggagcttataatgtcccagcaaatgtttcttcttcatctgttgggactatggacaacgacccagatgagtatgaatgtgaaagtgagggtggtacggaggacttaggggtggaaggttcagcacaacaaccaccacctcgtaacactaattccaagagaagtagagcagctgaagtgcacaatttgtctgaaaggaggaggagaagcagaataaatgagaagatgaaagcattgcaaaatcttattccaaattctaacaagactgacaaggcgtcaatgcttgatgaagctattgagtacctcaagcagtttcagctccaagtacagatgttgacaatgagaaatgggttaagcatgtatcctatgggcctaccacgagtgttacagcaaaatcaagtctcccagctaagtatggatttatgcgaggggaatggatacacaaatgctaaagcggctggggctctccacgtaaaccaagacacttcgttaaatgccattt

SEQ ID NO: 116 - protein, 246 aa, Nicotiana tabacum
MANNNIYHHNARTSFSLTEPDAEPDDISVFLRHILNHSSNFMTHETQYSSSLPHLLPKNQHGELSSVLNSSAGGIFSSSYGAYNVPANVSSSSVGTMDNDPDEYECESEGGTEDLGVEGSAQQPPPRNTNSKRSRAAEVHNLSERRRRSRINEKMKALQNLIPNSNKTDKASMLDEAIEYLKQFQLQVQMLTMRNGLSMYPMGLPRVLQQNQVSQLSMDLCEGNGYTNAKAAGALHVNQDTSLNAI

SEQ ID NO: 117 - DNA, 699 bp, Solanium lycopersicum
caaaattaacttgatctgctcaacactgaacttgattttgctggactataatggccaacaacaatgtttattatcacaatgctaatttttctttgactgatcctgatcctgaaccagatgatatttctgtgtttcttcgtcatattctacttccttcttcgtcttcgtcttcatcttcatctaattttatggccctgaagagtaatgaaatgcaatattcctcatcattacctcatcttatgcctaataataatcaacagggtaatttgtcatccatgatgaattcatcagcttgcggcattttctcgtcttcctatggggtttgtaatggtgcaactactgtttcttcctcatctgttgggaccatagattacgatccggatgagtatgaatgtgaaagtgaggatggtacagaggatttgggggcggaagcttcagttcaaccgccatctcgtaacacttccaagagaagcagagcagctgaagtgcacaatttgtctgaaaagaggagaagaagcaggattaatgagaagatgaaagcattgcaaaaacttattccaaattcaaataagactgacaaggcttcaatgcttgatgaagccattgagtatcttaagcagcttcagctccaagtacagatgttgacaatgagaaacgggttaaacatgtatcctcttggcctgccacgaatgctacaac

SEQ ID NO: 118 - protein, 378 aa, Solanum lycopersicum
MANNNVYYHNANFSLTDPDPEPDDISVFLRHILLPSSSSSSSSSNFMALKSNEMQYSSSLPHLMPNNNQQGNLSSMMNSSACGIFSSSYGVCNGATTVSSSSVGTIDYDPDEYECESEDGTEDLGAEASVQPPSRNTSKRSRAAEVHNLSEKRRRSRINEKMKALQKLIPNSNKTDKASMLDEAIEYLKQLQLQVQMLTMRNGLNMYPLGLPRMLQQNQLSHQKVSLCEGNAFTNAKSGWESTSEPGASLNAIFNPTENCTETKVTPPITMSNINRSDSAFELESSMNIHLDPFQLSRSTSKEIWREDDLPLYGMNELTTKTASTGSNLAFSVPLDTDASNLKRSTREACLLRYQFGAVNETNLDCDQLLSQQLYSNF

SEQ ID NO: 119 - DNA, 2940 bp, Vitis vinifera
gmtatcaatacgagtctctgtttctatgcatagggttttggggttttatctatatttggaagamkatgaaatttcctgatttaggagatggcattttattggagatgaaattcactgcttcaggctttttggcttttactaatatttgacatgctttaatgccattgaagcatgcaagaggtttctccttaatattccttttgaaaaacttagttttcatgggtattgaagtgtaactttttccgagtcttacattcctgaattgtccataattgttcagacggtcaacatctttgaggttaagaaatggacacctcaaggagcttaataatcttcttacttaaggcccagttgatgaccagcaggaagagatcmamacacaatwacaggactaggmattagaagatgaaatttccgtgatttacgagaagatagtgtactgtggcttaaattcactacttgaggggactagttcttcttttcttagttagctatgatgccattaaagatcaggaagctcatttagtttttgatgaatgatgaatctcaaagagtaacagttcaggagtcgttggttgtccataattattgatatggraaacctatcaatgcttcataaatatgcaaccaaagaagcttgtcattattgattcttgtaacataaatgatgagcactttgatgatatcagcattcctctggatgacatagaattgtaagaggaacttggcgtgaaacagtgaatttcgtgtatgaagaggaactttttgagaacccttttcataaattttcttatgtctttggtggacatggcatattaccaagggtgtagatcttacaagacttattttctagttagatctatttccttattgctttccaagttacatatagcaatttcagttcacacagaawattagtcaggaatttactaggtgatttaaaagtatctcacttgggttcaaatgcctatagaagccaacccctaygtttatccacatcattaagggcatttgaatcagcatgcaccagcagcaaacaacgaatagataaagttttattattgaaggagagtataaacctgtacttgaagctgaagctgcttgaggtattcgatggcctcatcaagcatggaagccttgtctgtctgttgtgaaaaaaagaaaaaagaaaaagaaaaaggaaaaggaaaaggaaaagggaaatcaacaattcagccaagaatccaaatggatccgtaggataaacagaaccaacaaaagagatgtayaccttgttagaatttggaattagattctgcaacgctttcattttctcgttaatcctactcctcctcctctgctcaacaaactccacacgtcaataccacaacagaacttccctaatcacaaagttctacagacaattgtactacaatccaacctttttcagacaaattatggacctcggcagccctgcttctcttcgacgaacttcgcagaggagctgcctttgtcgccacctcttccaccaatgcttcaagaccttcctgcaaatccatccaaaaattcaatagatcaaactcaaaaccaaaactcaacaaattmtacgggacaaacacacaacayaaagaacacaactgactacctcactctcgcagtcgtactcgtccaggtcattgtcgaagcctccagccgacgaagacgcagttccggcactcacgggaaaataaacgccggtggaggagttcattccgtcccgaacgaggcgatccgagcyggaaataagaggggatcgacactgtctgagaggattctcsgacagaaactcgctcggcataagtttggcattgtgaagcgaagtggttgacgacgacgacgacgaccggaaaagaatctggtggagaaagagagatatttcgtccggttccgaagcggatgacggtggcacaggagaagaagagcaaggcttggtgcactgatccgccattaacactatgaatacaagcagaacagagaaattgtgggcggggtttaaatcaaatgatcggggcacgcgctgctggtgcgagtggggagatcgacagagaacggtcaacagtttcagttactagccttccttaaaatgattgggctgtcaactcttaaaaatgacaggcggcagtgtctcaaacagctcgccggtgcacgtgacgtgaggcatcccccaccgatcactaaaccattaaaccatctaaccctatttcggtgataaataaagggccagtctaatccttttagttttttattttwtttattttttatatacaatgaattttcaaaaatactttttaaaaacattcctaaaaaatccatattttaaaaatacttttaatctttcaataatacctctccatatataataaatactaaatactatttatttggaaaaaataaatttaattagcccattatcaaatccattaataattcttttattcgatagaagctaaatsaaagtagaagggacaaaagattatgggcctggaaattaaagtaggtaagtaatataatagtatggaattggcgtgaccttacctcccttatwratattaatttggacccattattaattttggacggtcaaagcaaaagacgagacctctcactatcacagcctttcactatcttgtccgaaccaacgtcaccttaaccagacacaccaaataatgtcgcaaatatttatcaatatctttgccagcctttttcrtcagtacatacacgtggcgaaaatccattggaggaatagatctcgtatccaacgtgtgtacgtttcatgtgggaccaccagagtatctgtgtcaccatcatcccacgtcacacaccggatcaaatccagacacggcaagtaatgctgatggcgttggaccgtgacgtgtcaacaggataggatgattgctgcattgagatgcgtctcgtkggggc

SEQ ID NO: 120 - protein, 295 aa, Vitis vinifera
MADQCTKPCSSSPVPPSSASEPDEISLFLHQILFRSSSSSSTTSLHNAKLMPSEFLSENPLRQCRSPLISSSDRLVRDGMNSSTGVYFPVSAGTASSSAGGFDNDLDEYDCESEEGLEALVEEVATKAAPLRSSSKRSRAAEVHNLSEKRRRSRINEKMKALQNLIPNSNKTDKASMLDEAIEYLKQLQLQVQMLSMRNGLSLHPMCLPGVLPPVQLSQMRIGIGEENGSLHMDMTGTLPVNQETMEYRLANQGTSSSHPSVPNLTDIMNSETSFGLESSIQAHLGPFQLQTSSA

SEQ ID NO: 121 - DNA, 1146 bp, Glycine max
atgggtgacatgtaccactttgacaagaacctctcctcacaagacgaaatctcactttttctgcgtcagattctgctccgttcatcttcaccttcccactccatgcctgctggatcctgcacctccaacgctgctcaacaaaacgtaaatgcacaccacccttctttcacggcgtcacagctccaagatgggaagatcttggccgttgattccaccgcttcttttgtctccggttctgctgcttgcagttccttcaagggccatggtgcttctgctgcaaatgtgtcttcttcttctgctggagtgagtgagaacgagaatgatgactatgattgtgagagtgaggagggtgttgaggctccggccgaagaagttccaacaaaggctgcttcttctaggagttcatctaaaagatcaagagctgcagaagttcataatttgtcagagaagcggagaaggggtaggatcaacgagaaaatgaaggctttgcaaaacctaattccaaattctaacaagacagataaggcttcaatgctcgatgaagctattgaataccttaaacagcttcagctacaagtacagatgctgtcaatgagaaatgggttgagtttgcatcctatgtgctttcctgaaggcttgcagcctctgcagttgtctcagatgggtatggaattaagtgaaagaaacaggtttacctctttaaacatgtcagctactctgcctctgcaccaagacaacaatcccttgcactatgcatccaatctacctaacaaacacaatctcccaaatcagccatctgtgccctatcctccatacattgacaacccagaaacttctttcggtctggaaccccgaatccaaacggatatgaaacctcttcaacacaaaggaggatcttctgagccaatacgaggggaagacattttgcagcaccagcaatcaagtggtatccattcagatgccaatacattaggtggttctcaagttgtcaaagaattcgaatcaggcacgagactatcattcccttttgacacgcaagcatgtgaacccaaagacaacagcaactcttcgcaaccatgcattggcggaagagatcattcaggagtgatcataagaaatagtgagaccaacattgttggtaggtag

SEQ ID NO: 122 - protein, 381 aa, Glycine max
MGDMYHFDKNLSSQDEISLFLRQILLRSSSPSHSMPAGSCTSNAAQQNVNAHHPSFTASQLQDGKILAVDSTASFVSGSAACSSFKGHGASAANVSSSSAGVSENENDDYDCESEEGVEAPAEEVPTKAASSRSSSKRSRAAEVHNLSEKRRRGRINEKMKALQNLIPNSNKTDKASMLDEAIEYLKQLQLQVQMLSMRNGLSLHPMCFPEGLQPLQLSQMGMELSERNRFTSLNMSATLPLHQDNNPLHYASNLPNKHNLPNQPSVPYPPYIDNPETSFGLEPRIQTDMKPLQHKGGSSEPIRGEDILQHQQSSGIHSDANTLGGSQVVKEFESGTRLSFPFDTQACEPKDNSNSSQPCIGGRDHSGVIIRNSETNIVGR

SEQ ID NO: 123 - DNA, 834 bp, Glycine max
atgggtgacatgtaccactttgacaagaacctctcttcgcaagacgaaatctcactttttctgcgtcagattctgctccgttcatcaccaccttcttcttcttcatcttcccgccccatgcctactgtatcctgcacctctaacgttgctcaccaaaacgtaaatgcacacccttctttcacagcgtcgcagctccaagatgggaagatcttggcccttgattccaccgcttcttttgcctcgggttctgccgcttgcagccccttcaagggccagggtgcttctgctgcaaatgtgtcttcttcgtctgctggagtgagtgagaacgaaaatgatgactatgattgtgaaagtgaggagggtgttgaggctttggccgaagaagttccaacaaaggctgcttcttctaggagttcatctaaaagatcaagagctgctgaagttcataatttgtctgagaagcgaagaaggagtaggatcaacgagaaaatgaaggctttgcaaaacctaattccaaattctaacaagacagataaggcttcaatgctcgatgaagctattgaataccttaaacagcttcagctccaagtacagatgctgtcaatgagaaatgggttgagtttgcatcctatatggacaacaaccccttgcactatgcatccaatcagccatgtgtgccctatcctccatacattaacaacccagaaacttctttcggtctggaaccccgaatccaaccggatacgaaacctcttcaacacaaagaaggatcttctgagagatcattcaggagtgatgataagaaatagtgagaccaacattgttggtaggtaa

SEQ ID NO: 124 - protein, 277 aa, Glycine max
MGDMYHFDKNLSSQDEISLFLRQILLRSSPPSSSSSSRPMPTVSCTSNVAHQNVNAHPSFTASQLQDGKILALDSTASFASGSAACSPFKGQGASAANVSSSSAGVSENENDDYDCESEEGVEALAEEVPTKAASSRSSSKRSRAAEVHNLSEKRRRSRINEKMKALQNLIPNSNKTDKASMLDEAIEYLKQLQLQVQMLSMRNGLSLHPIWTTTPCTMHPISHVCPILHTLTTQKLLSVWNPESNRIRNLFNTKKDLLRDHSGVMIRNSETNIVGR

SEQ ID NO: 125 - DNA, 1028 bp, Solanium lycopersicum
cccaaagcaacacgcatacgattcttctgagttttctgcagatgattgttttgtgatggtggtaattgtcaatggcggatccgtacagaacgaaccctcacgcttcttcatctctcgaatccgaagatatgtcttccttttttcttaattttcttcaaggaacgtccgcttcctcttctgcgactgctgcggctggtttttataaccgatcgggaccggcgccggtggctgagtcatcttctagcctcaatttctccgatcccggccgattttatgctgccgagttcaaggaaggcgttgagaatgtgtttgcttctgctggcctcggggaatgtgacggtatgaattcagctaataggagagagtttttggaagatgataaggttgataacttcggttttagtagcgaggaatgtgatggacttgacatgccatctgatccgactcatccacgttcttcaaagaggagtagatctgctgaagttcataatttgtccgagaagaggaggaggagtaggatcaatgagaaactgaaagcattgcagaacctaattccgaattctaacaaaactgacaaggcatctatgcttgatgaagccattgaatatctgaagcaacttcaactgcaagttcagatgcttaccttgaggaatggattgagtttatacccaggatatgttcccgggtctttgcagtcggtgcaacttccatctggtaatgaatttgatgggagaagttttatgctgagtgcaaatggaggagctacacttcctgtgaatcgagaaatgccacaaactgcatttgaaatttccaatcagaatccgtcaggcaaaccaacaataacctcacataacacagaaaacgctgtagctttagaaactacaattcagaatcattatggacttcttaaccatttagcatcttctaaggacatgtgccgagacaatacactatcaagattgcatttagatatgagttgctctggaaacaattcatcatcaggagtgtcgtcttaaccaaatttcaca

SEQ ID NO: 126 - protein, 314 aa, Solanum lycopersicum
MADPYRTNPHASSSLESEDMSSFFLNFLQGTSASSSATAAAGFYNRSGPAPVAESSSSLNFSDPGRFYAAEFKEGVENVFASAGLGECDGMNSANRREFLEDDKVDNFGFSSEECDGLDMPSDPTHPRSSKRSRSAEVHNLSEKRRRSRINEKLKALQNLIPNSNKTDKASMLDEAIEYLKQLQLQVQMLTLRNGLSLYPGYVPGSLQSVQLPSGNEFDGRSFMLSANGGATLPVNREMPQTAFEISNQNPSGKPTITSHNTENAVALETTIQNHYGLLNHLASSKDMCRDNTLSRLHLDMSCSGNNSSSGVSS

SEQ ID NO: 127 - DNA, 705 bp, Solanium lycopersicum
caaaattaacttgatctgctcaacactgaacttgcaccagctggactataatggccaacaacaatgtttattatcacaatgctaatttttctttgactgatcctgatcctgaaccagatgatatttctgtgtttcttcgtcatattctacttccttcttcgtcttcgtcttcatcttcatctaattttatggccctgaagagtaatgaaatgcaatattcctcatcattacctcatcttatgcctaataataatcaacagggtaatttgtcatccatgatgaattcatcagcttgcggcattttctcgtcttcctatggggtttgtaatggtgcaactactgtttcttcctcatctgttgggaccatagattacgatccggatgagtatgaatgtgaaagtgaggatggtacagaggatttgggggcggaagcttcagttcaaccgccatctcgtaacacttccaagagaagcagagcagctgaagtgcacaatttgtctgaaaagaggagaagaagcaggattaatgagaagatgaaagcattgcaaaaacttattccaaattcaaataagactgacaaggcttcaatgcttgatgaagccattgagtatcttaagcagcttcagctccaagtacagatgttgacaatgagaaaacggttaaacatgtatcctcttggcctgccacgaatgctacaacaaaatc

SEQ ID NO: 128 - protein, 219 aa, Solanum lycopersicum
  misc_feature (219)..(219): Xaa can be any naturally occurring amino acid
MANNNVYYHNANFSLTDPDPEPDDISVFLRHILLPSSSSSSSSSNFMALKSNEMQYSSSLPHLMPNNNQQGNLSSMMNSSACGIFSSSYGVCNGATTVSSSSVGTIDYDPDEYECESEDGTEDLGAEASVQPPSRNTSKRSRAAEVHNLSEKRRRSRINEKMKALQKLIPNSNKTDKASMLDEAIEYLKQLQLQVQMLTMRKRLNMYPLGLPRMLQQNX

SEQ ID NO: 129 - DNA, 1272 bp, Oryza sativa
catcaatgaacctctccaccccaccccgcgacgcgacgcgacgagccgtacaccgaccgccccgcgccgctgctgccggagccggagagagaagctgaagccgaagcagaggcagccgcagcggcaaaactcaaaagacgtcgtcaaaagctctgccgcgcttgcagctttctcgggctcaaggaaaagccatcacaaaaccagagacacagagagagagagagagaaactgaagaaaggtggcaactcctgcagcagctgcagcagcaagcgctagtgtttgtggtttgctggtgctgtggcgaggcgatgatggatgggcgaggaagccaggaggaggagcacctggatttgatcatgcgacaccacgccagcatggggctggatcgctgcgagagcgaggaggcgctggggtcgtcggagtcggagcagcccaccaggccggcgcggccgcgcggcaagaggagccgcgccgccgaggtgcacaacctctccgagaagaggaggaggagcagaatcaatgagaagatgaaggccctgcagagcctcattcccaactccagcaagacggacaaagcctccatgcttgacgatgccatcgagtacctgaagcagcttcagctccaggtccagatgttgtccatgaggaatggtctatatctgcccccagtgaacttatctggggcacctgagcatctgccgatcccgcaaatgagtgctgcacttgaccagaatagtgccaaagcatcagatccttcagttgttttgcagccggtgaaccagacttcaggagcacttcttccatttgagctggcaagccaacataaacctctattcttaccaggtgttcctaatgcaaccgctctggagcctcggttccttgtagagtcttcgcgttccaatcttcaatccttacggttcactgaacccgctgagatgatctatcctgatgagatgatgttaaagcaccgcctgacttcagctagtgagagcacaattgtgccaggaaccgatgagaagtcggttaggcagaacacatacatgatgaatgctgatcgttttgatagatatgcactcagcaaagaccagttgcagcacattatgccgaaaaacacagaaagtgtacttgatatgccacacttgcaaagaattctgacaaaggtgttaattgtttcagattataagctgacgattcagcttccaatcttggacaggttgcaaaccagtgacaccaaagttagggtcgagggcagaatcaaagtaaacccatga

SEQ ID NO: 130 - protein, 320 aa, Oryza sativa
MMDGRGSQEEEHLDLIMRHHASMGLDRCESEEALGSSESEQPTRPARPRGKRSRAAEVHNLSEKRRRSRINEKMKALQSLIPNSSKTDKASMLDDAIEYLKQLQLQVQMLSMRNGLYLPPVNLSGAPEHLPIPQMSAALDQNSAKASDPSVVLQPVNQTSGALLPFELASQHKPLFLPGVPNATALEPRFLVESSRSNLQSLRFTEPAEMIYPDEMMLKHRLTSASESTIVPGTDEKSVRQNTYMMNADRFDRYALSKDQLQHIMPKNTESVLDMPHLQRILTKVLIVSDYKLTIQLPILDRLQTSDTKVRVEGRIKVNP

SEQ ID NO: 131 - DNA, 904 bp, Arabidopsis thaliana
aatttttacacacagagtagagcagagagagagagagagagagagatgggtgattctgacgtcggtgatcgtcttccccctccatcttcttccgacgaactctcgagctttctccgacagattctttcccgtactcctacagctcaaccttcttcaccaccgaagagtactaatgtttcctccgctgagaccttcttcccttccgtttccggcggagctgtttcttccgtcggttatggagtctctgaaactggccaagacaaatatgctttcgaacacaagagaagtggagctaaacagagaaattcgttgaagagaaacattgatgctcaattccacaacttgtctgaaaagaagaggaggagcaagatcaacgagaaaatgaaagctttgcagaaactcattcccaattccaacaagactgataaagcctcaatgcttgatgaagctatagaatatctgaagcagcttcaacttcaagtccagactttagccgttatgaatggtttaggcttaaaccctatgcgattaccacaggttccacctccaactcatacaaggatcaatgagaccttagagcaagacctgaacctagagactcttctcgctgctcctcactcgctggaaccagctaaaacaagtcaaggaatgtgcttttccacagccactctgctttgaagataacattcagacaatgatgatgatcggaattcctctagtacctgccagacaggagtgaacaatgttttgagttttagcattggccagatttctatgttcagttatagttatgctaataagctttaggagtgaacaaaatctgagtagtttgattataatgatgtctgaagcagattatatataaaagactaatttacttacatatgagatgattattacaact

SEQ ID NO: 132 - protein, 210 aa, Arabidopsis thaliana
MGDSDVGDRLPPPSSSDELSSFLRQILSRTPTAQPSSPPKSTNVSSAETFFPSVSGGAVSSVGYGVSETGQDKYAFEHKRSGAKQRNSLKRNIDAQFHNLSEKKRRSKINEKMKALQKLIPNSNKTDKASMLDEAIEYLKQLQLQVQTLAVMNGLGLNPMRLPQVPPPTHTRINETLEQDLNLETLLAAPHSLEPAKTSQGMCFSTATLL

SEQ ID NO: 133 - DNA, 55 bp, Artificial sequence
  primer: prm11534
ggggacaagtttgtacaaaaaagcaggcttaaacaatggaggatctgtacggagc

SEQ ID NO: 134 - DNA, 50 bp, Artificial sequence
  primer: prm11535
ggggaccactttgtacaagaaagctgggttcataactaggccacaccaga

SEQ ID NO: 135 - DNA, 2194 bp, Oryza sativa; identical to SEQ ID NO: 95

SEQ ID NO: 136 - protein, 12 aa, Artificial sequence
  motif I
EEISTFLHQLLH

SEQ ID NO: 137 - protein, 11 aa, Artificial sequence
  motif II
DLGDFSCDSEK

SEQ ID NO: 138 - protein, 49 aa, Artificial sequence
  motif III
AAEVHNLSEKRRRSRINEKMKALQNLIPNSNKTDKASMLDEAIEYLKQL

SEQ ID NO: 139 - DNA, 1104 bp, Saccharum officinarum
atggtgggatccgacgcgctgcagtccatcgtttacgcccgtgggtcgctccgcctccttgatcagaggaagctgccgctcgagatggactacatcgacgtcaagagttccgccgacggctggaatgcaataagagacatggttgtccgtggtgctccagcaatagccatagcagcggcactagcattagctgttgaagtttctgatttagatttcattggtacgcctggagaagcagcttcttttgtttccaagaaattggaataccttgtatccagccgaccaactgcagtgaacctatctgatgctgcaacaaagctccaaactttggtgtcaaaggcagctgaaactgcaaaagattccaaggctatctttcaggtctacattgaggccgcagagacaatgcttgttgatgatgtggcagataataaagctattggctcacatggagctgtatttcttcaaaggcagcttgcaaattcaaaaaagatatctgttctaacccattgtaatactggcagtcttgcaactgctggttatggaactgccctcggggttatacgtgctcttcattcggagggagttttagagaaggccttttgcactgaaactcgtccatttaaccagggatccaggcttacagcttttgagttagttcatgaaaaaatacctgcaacactgatagcagattctgctgctgctgcattgatgaaacaagggcgtgttcaggcggtcgttgttggtgctgaccgaatagcagcaaatggtgacacagccaacaagattgggacatacaacctcgccatctccgcgaagcatcataacgtccagttctatgtggcagcaccggtaacttccattgatctctccctcccatctggagatgaaatagtcatagaggaaagatcacccaaggagttgctgaactctgaaggtggtctgggaaagcaagttgctgcatccggtatatcagtctggaaccctgctttcgatgttactccagcaaatctgatcactgcaatcataacagaaaagggtgtcatcacaaaaactgatactgatggatcttttgacatcaaaggattccttcagcctgcaaaataa

SEQ ID NO: 140 - protein, 367 aa, Saccharum officinarum
MVGSDALQSIVYARGSLRLLDQRKLPLEMDYIDVKSSADGWNAIRDMVVRGAPAIAIAAALALAVEVSDLDFIGTPGEAASFVSKKLEYLVSSRPTAVNLSDAATKLQTLVSKAAETAKDSKAIFQVYIEAAETMLVDDVADNKAIGSHGAVFLQRQLANSKKISVLTHCNTGSLATAGYGTALGVIRALHSEGVLEKAFCTETRPFNQGSRLTAFELVHEKIPATLIADSAAAALMKQGRVQAVVVGADRIAANGDTANKIGTYNLAISAKHHNVQFYVAAPVTSIDLSLPSGDEIVIEERSPKELLNSEGGLGKQVAASGISVWNPAFDVTPANLITAIITEKGVITKTDTDGSFDIKGFLQPAK

SEQ ID NO: 141 - protein, 42 aa, Artificial sequence
  motif 1
  VARIANT (3)..(3): / replace = "Arg"
  VARIANT (15)..(15): / replace = "Val"
  VARIANT (17)..(17): / replace = "Ile"
  VARIANT (18)..(18): / replace = "Glu"
  VARIANT (19)..(19): / replace = "Val"
  VARIANT (20)..(20): / replace = "Arg"
  VARIANT (22)..(22): / replace = "Ala"
  VARIANT (31)..(31): / replace = "Glu"
SLQLLDQRKLPLETIYLDIKDSADGWNAIRDMVVRGAPAIAI

SEQ ID NO: 142 - protein, 41 aa, Artificial sequence
  motif 2
  VARIANT (21)..(21): / replace = "Ser"
  VARIANT (25)..(25): / replace = "Gly"
  VARIANT (29)..(29): / replace = "Leu"
  VARIANT (30)..(30): / replace = "Lys" / replace = "Ser"
  VARIANT (32)..(32): / replace = "Phe"
  VARIANT (33)..(33): / replace = "Ala"
HCNTGSLATAGYGTALGVIRALHSEGVLERAYCTETRPFNQ

SEQ ID NO: 143 - protein, 21 aa, Artificial sequence
  motif 3
  VARIANT (5)..(5): / replace = "Ile"
  VARIANT (8)..(8): / replace = "Glu"
  VARIANT (13)..(13): / replace = "Ser"
  VARIANT (20)..(20): / replace = "Tyr"
EAAETMLVDDVADNKAIGSHG

SEQ ID NO: 144 - protein, 42 aa, Artificial sequence
  motif 4
  VARIANT (1)..(1): / replace = "Ala"
  VARIANT (14)..(14): / replace = "Thr"
  VARIANT (15)..(15): / replace = "Val"
  VARIANT (21)..(21): / replace = "Ser"
SLRLLDQRKLPLEMDYIDVKDSADGWNAIRDMVVRGAPAIAI

SEQ ID NO: 145 - protein, 41 aa, Artificial sequence
  motif 5
  VARIANT (11)..(11): / replace = "Val"
  VARIANT (18)..(18): / replace = "Leu"
  VARIANT (22)..(22): / replace = "Arg"
  VARIANT (23)..(23): / replace = "Glu"
  VARIANT (24)..(24): / replace = "Thr"
  VARIANT (29)..(29): / replace = "Ser"
  VARIANT (31)..(31): / replace = "Ala"
  VARIANT (32)..(32): / replace = "Ala"
  VARIANT (38)..(38): / replace = "Tyr" / replace = "Leu"
CNTGSLATAGYGTALGVIRALHSGGVLEKAFCTETRPFNQG

SEQ ID NO: 146 - protein, 29 aa, Artificial sequence
  motif 6
  VARIANT (2)..(2): / replace = "Ala"
  VARIANT (3)..(3): / replace = "Gln"
  VARIANT (7)..(7): / replace = "Asp"
  VARIANT (10)..(10): / replace = "Val"
  VARIANT (16)..(16): / replace = "Val"
MKSGQVQAVIVGADRIAANGDTANKIGTY

SEQ ID NO: 147 - DNA, 51 bp, Artificial sequence
  primer: prm08213
ggggacaagtttgtacaaaaaagcaggcttaaacaatggtgggatccgacg

SEQ ID NO: 148 - DNA, 50 bp, Artificial sequence
  primer: prm08214
ggggaccactttgtacaagaaagctgggtgccacgcttgagagtattatt

SEQ ID NO: 149 - DNA, 2194 bp, Oryza sativa; identical to SEQ ID NO: 95

SEQ ID NO: 150 - DNA, 2511 bp, Chlorella
atggccctagaagccatcaggttcagccgtggcggcggcctggcgccggcctccctgcagctgctggagcagagaaaattgccgctggagacggagtggctggacatcgatgggccccagtccgcctggaccgccatccgcgatatgacagtgcgcggcgcgccggcgatcgccattgccgccgcgctgagcctggcggtcgacctgatcaacagcggcggcggcagccagtttcagggccccgccgccgccgcagcctacgtcgcgcagcagatggactttttggtcaccagccggcccaccgccgtcaacctgagcatcgcggcagaggcgctcaagaggctggcgggcgaggaggcgggccgggcgggggccaccgccgccagcgtgacggcggctgtggtggcggcgtgccaagccatgatggctgaggatgttgcggcaaacaaggcgatggggcgccacggcgccgacgccctgctggcggcagcccaggagcgcggccgcgccggcagcggccgcctgcgcgtgctgacgcactgcaacaccggcagcctggccaccgccgcctacggcacagccctgggcgtgatccgcgccctgcacgagcaggggcgcctggagcatgcatactgctgcgagacccggccatacaaccagggcgcgcggctgactgcgtatgagctggtgcatgacggcttgcccagtactctcatctgtgactcggctgcggcggcgctgatggcgtcgggcagggtggatgccgtggtggtgggcgcggaccgcatcgccgccaacggggacacggccaacaagattggcacctactgccacgcggtggcggcccgccaccacggcatccccttctttgtggcggcacccaccaccacactagacccccagctggacaccggcagcctcatccccattgaggagcggtcccccgaggaggtcacgcatttcaaggggcagcgggtggcggcggacatccctgtgtggaaccccagctttgacgtgacgccagcggagctgattgaaggcctcatcacggagagagggctggtgccgcgggcgctcgccgccagcggcggctttgcggtacgcagctggctggcggccgccgccgcggccaacggcgtcggcggcgcggcagccaacggcggcgtttcaggcgccgccgcgccgccggccaggccgctggccacgcagcccggctaccaggcgctcgattgcggcacggtggtggagtatgtggcggcgcggccgcagctggccaagcacgtgggcaggcccgacaccaagaacagctggcaggtgcgtgaggtgggggacggcaacctcaactttgtgtacgtcgtggaggggccggcgggctcgctgtgcgtcaagcaggcgccgccctttgtgcgcgtcgtgggcgagtcgtggccgctgacgcaggaccgcgtgcggatcgaggcggcggcgctcgaggcggaggcggcgcactgcccgcagcacgtgccggccctgtactggttcgacccacgcatgtgcatcatcgctatgcagtaccttgcgccgccgcacatcatcgtgcgcaagggactgattgagggccgcctctacccacgcctggcctcccacctcgcctccttcctggccgccacactgttccacacctcgctgctggcgctgcccagcgacgagttcagggccaacataggtcgcttcacaaacgtggagatgtgccgcttgacggagcaggtggtcttcacagatccgtactacccatcggagcacaaccgccacacctccccgcagctgaacgctgacgtggcggcgctgcgtgctgacgtggccgccagggtggcggccgccaagctcaaggccaagttcacgcagcagcaccaggcgctgatccacggcgacctccacaccggctccatcatggccacagaggacagcacgtatgttattgacccggagtttgcctactatggtcccatggcgtttgatgtgggcaagatcctggccaacctgctgctcatgttcttcgcctgcgacggccacgccacggatgcggagccccgcatgcagcagcgccgctggctgctggacgcgacaaaggaggtgtgggagggcttcagccgccgcttctgcgagctctggcatcagcacggcgccaggggcgacgcctacgctgctgtgctgtttggcggcggcgccgagcagggtgaggaggcgctggcccaggcgcaacgccagttcatgcaggagctgtggagggatgcggtggggttcctgggggccgtggtcatccgtcgcctggtgggcattgcacacgtggcggacatggacagcatcccagatgatgacgtgcgtgcggtgtgcgagcggcgggcgctgcgctttggtcgcaaggcgcttgtggaggcggcgcaggtgggcggcgtggagcagctgctgcagctggcagaggcggtgcggcaggatggccagcagcccttgttcccgctcccgtcgacgtga

SEQ ID NO: 151 - DNA, 1104 bp, Hordeum vulgare
atgggcgaatcgagcgcgcttcagtccatcctctacggccgcggcgcgctccgcctcctcgatcagaggaagctgcccctcgaggaggtctacgtcgacgtcaaggactccgcggatggatggaatgcgatcagagacatggttgtccgtggtgctcctgccatagccatagcagcagcactatcattggctgtggaagttaatgatcacaatttcattggtacacctgcggaagcagcctcgttcgtttccaagaagttggaataccttgtatccagccggcccacagcagtgaacctgtctgatgctgctacaaagcttcagaacttggtgtcaacaacagctgaaacagcaaaagatgccaaatctatctttcaggtcttcattgaagctgcagagactatgctagttgatgatgtggctgataataaggcaattggtttgcatggagctgaattccttcaacggcagcttggaagttcaaaaaacatttctgttctaacccattgtaatactggcagccttgcaaccgctggttatggaactgcccttggggttattcgtgctcttcactctggaggagttttggagaaggccttctgcactgaaactcgtccatttaaccagggttccaggcttacagcttttgagttagttcatgacaaaatacccgccacgttgatagcagactctgctgcagctgcactgatgaataatgggcaggttcaagctgtaattgtgggtgctgatcgtatagctgcaaatggtgacacggccaacaaaattggtacatacaacctctcgattgctgcaaagcatcacggcgtgcagttctacgtggcagcgccagtaacttcgattgatctctccctcccatctgggaagcaaatcgtcatagaagaaagatctcccaaagaattgttgaactctgaaggtggtctaggaaagcaagttgccgcgtcaggtatatcagtctggaaccccgccttcgacgttactccagcaaatctaattactgcaatcattacagaaaagggtgtgatcacaaagtctgatcctgatggaactttcgacatcaaaagcttcattgagtgtgccaagtga

SEQ ID NO: 152 - DNA, 2421 bp, Ostreococcus RCC809
atgtcggcgctggaggcgatcgtgtacgagcgcggggcgctcaagttgctcgatcagctcaaactcccgctcgagacgacgtacgtcgacgtcgaggattgcgacgcgtgttggcgagcgatcaaggatatgaacgtgcgtggtgcgccggcgatcgctattgcggcggcgctggcgttggcggtggagctggagaagaaaaagggggagctcgcgacgtgcgaggcggcggaggcgttcgtgcacgaacggttcgatcacatgtacacgtcgagaccgacggcggtgaatcttggagaggcgagaacgagaattaaatcgttggcgacgtctctgaaggcgaacggggacgcgggagcgatgattgagggagtgattgaggcgtgcgaggcgatgttggcggaggacgtggcttcgtgccgagccatcggggcgaaaggggcggaggctctgttgagagcggtgaacgcgaaggatggacaaaagattaaagtcatgacgtgctgtaacacggggtcgctcgccacggcgggatacgggacggcgttgggggtgattcgcgcgctgtgggaaacgggatgtcttgaacgcgcgtactgcttggagacgcgtccgtacaatcaaggctcgcgtttgacggcgtacgagctcgtgtacgaaagcattccgggtactttgatttgcgataacatggcggcggcgctcatggcgcgcggagacgtcgacgcgatcgtcgtgggtgcggacagggtcgccgcgaacggcgactttgccaataagattggcacgtattcgctcgcggtgaacgcgaaacaccacggcgttcccatgttcacggccgcgccggtgacgacgctcgatcctaagaccgcgaccggagccgatattcacatcgaggagcgacccgggaaggaggtgacgcattcgctcggtcgtcgcgttgcggcggagggcatcgacgtgtggaatccgtccttcgacgtcacgcccgccgccctactcgccggcgtcatcaccgagcacggcgtcatcgaaaagaacgtcagcggtgtcttccccgtcgccgagttcgtcgcgaacgcgaagaacgggaaaatcaaggcggccaagccctcgggtccgccgggattcatcgccctcgattgcgaaaccgttctcgattacgcggcgtccaaggataacgtcgccgccgttctgggcggcgcgtccacgcgaagcgcttggtccgcgaaagaaatcggtgacggaaacatcaactttgtgtacatcatcaccggcgtatcagccgataaatccgtcatcgtcaaacaaggtttacccttcgtgcgatgcgtcggcgagagttggccgctgacgcaagagcgcgtgcggtacgaagccgaggcgctcatccaggcgcataaatactgtcccgcgcacgtgcccgaggtgtacatctacgatccgacgatggctaccatcgtgatgcggtacctcgagcccccgcacatcatcctgagaggcggcatcatcgaaggaaagttgtatccgaagttagccgaacacgtcggcgagtacttggcgacgacgctctacaaatcgtccgctctctccgtgggcggcgccgcgcttcgtcgcgcgcgccaagcgttcggacaaaacgaagacatgtgtgaactcaccgaacaagtcatcttcacggagccgtacgggaaggcggacaacaaccactggacgacgccgcaactcgatgacgtcgtgggtcagattcaatccgacgccgctctcaagcgcgccgtcaacgtgttgaaggaaaagttcatgaccgaaggtcaagcgttgttgcacggtgatttacacacgggatcgttgatgtgcaccgagacgacgacgttcgccatcgataacgagtttgccttttacggaccgatgggcttcgacgtcggactgtttttcgccaacttgttgctcgcgtacttttcgcagcgcggttgggccgatcgcaagggcgaatatcgcagcacgcaaggtgattggctgttggatacgttcaattcgacgtgggccgtcttcgagaagcgtttcttggagcaatggaacgaacaaggcgttcgagatgactgcggtggattgtctccggctattttgttcggcgcgggcgtcgccgatggagcgaacgcgttaaaggcgcatcaaggggcgtacatgaaacagatttgggaagatagtttaggattcgcgggtgcggaaatgattcgtcgcatcatcggcatcgcgcacgtggccgacctcgatgaaattccagacgccgacattcgagcgctgtgcgaacgcgcggcgctcatgtgcggacgcgagctcatgctcaacgcgaagaagctcacgccggcgtccatcgtggacgtcgtcaagagccaggaatttgcagtttttgcaatttaa

SEQ ID NO: 153 - DNA, 1125 bp, Oryza sativa
atgggcgaattgggcgctctccagtccatcgtctaccaccgcggatcgctccgcctgcttgatcagaggaagctcccactcgaggtggactacatcgacgtcaagtgctccggcgatggatggaacgcaatcagagacatggttgtccgtggcgctcctgcgattgccatagcagcggctttggctctggctgtagaggtttctgggttggaggatttcaccggtacgcctgcagaggcagcagcttttgtttccgagaaattggagtaccttgtatcgagccgcccaactgcagtgaacctatctgatgctgcaaccaagcttcggagtttagtttcaaggacagcagaaactgagaaagatgccaaagcaatctttcaggcctacattgatgcagcagagaccatgctagttgacgatgtgtcagataacaaggcaattggctctcatggagctgagtttctcaaacagaaacttgaggtctctaaagatatttctgttctaacccactgtaatactggcagtcttgcgactgctggttatggaactgccttgggggttattcgtgctcttcactctggaggaattctagagaaggccttttgcactgaaactcgtccatttaaccagggttccaggcttacagctttcgagttagttcacgacaaagtacccgcaacgctgatagcagattctgctgcagctgcactgatgaagagcgggtgtattcaagctgtaatcgttggagctgatcgaatcgctgccaatggtgatactgctaacaagattggcacatacaacctcgccatttctgcgaagcatcacggtgtgcaattctacgtggctgcgccgataacttcgattgatctctccctcccatctggtgagcaaattgtgatcgaagagaggtctcccaatgagttgctgaactctgaaggtggcctaggtaagcaagtcgccgcgtcaggtatatcggtgtggaaccctgccttcgatgttactccggcaaatctgattaccgcaatcataacggaaaagggtgtgatcacaaagtctgatgctgatgagactttcaacatcaaagatttcatccagtctgcaaaattgtactctaccatgcagtga

SEQ ID NO: 154 - DNA, 1029 bp, Oryza sativa
atgcaagcgcttaacaccaccagtttgaccctgcgggacaaccgcctttggatcctcgatcagcaagccctgccacaggaaaagcggtggcgcgcctgcgacagcgtggaggagttggtcgggcacattcacagcctgcgggtgcgcggcgcgccgctgatcgggctgtccgccagcctgctgttggcgctgctggcggaacgcggtgtgccgcgcgccgagctggaacaggcgctgcacacgctgcgcgccgcccgcccgacggcggttaacctgatgaacaatctggatcgcatgaagctggcgctggcggagcctgactgggtgccggcgatggcgaacgaagcgctgcggctggtggaggaagatcgccggctgtgcgatcgcatcgccgatcacggcgctggtctgatcaagcccggcagccgcctgctgacccactgcaataccggcgggttggccaccgccggcgtcggcaccgccatcggcgtgctgctgcgcgcccaccagcagggcaaagtgcaacaggtatgggttgatgaaacccggccgctgctgcagggcggccgtctgaccgcctgggaactgggcgagctgggcattccctatcgtctgatctgcgattcgatggccgccagcctgatggcgcagggccaggtcgatgcggtgtgggtcggcgcggatcgcatcgccgccaacggcgacgtcgccaacaagattggcacctacagcctggcggtgctggcgcactaccatggcattccattctatgtggctgccccgcataccacccacgatccgcactgtccggacggcgccgccatcccgatcgagcaacgcgcggcggccgaagtcaccggcgtttcaggcagtttcggcgcctgccagtgggcgccggccgatgcgccggtctgcaatccggcgttcgacgtcacgccggccaagcttatcagcgggtgggtgttcgacagcggcgtgatcacgccgcagcaggttgaagcggggattttccagcgggcgctgggttaa

SEQ ID NO: 155 - DNA, 477 bp, Oyrza sativa
atgggcgaattgggcgctctccagtccatcgtctaccaccgcggatcgctccgcctgcttgatcagaggaagctcccactcgaggtggactacatcgacgtcaagtgctccggcgatggatggaacgcaatcagagacatggttgtccgtggcgctcctgcgattgccatagcagcggctttggctctggctgtagaggtttctgggttggaggatttcaccggtacgcctgcagaggcagcagcttttgtttccgagaaattggagtaccttgtatcgagccgcccaactgcagtgaacctatctgatgctgcaaccaagcttcggagtttagtttcaaggacagcagaaactgagaaagatgccaaagcaatctttcaggcctacattgatgcagcagagaccatgctagttgacgatgtgtcagataacaaggcaattggctctcatggagctgagttctcaaacagaaattga

SEQ ID NO: 156 - DNA, 459 bp, Oyryza sativa
atgggcgaattgggcgctctccagtccatcgtctaccaccgcggatcgctccgcctgcttgatcagaggaagctcccactcgaggtggactacatcgacgtcaagtgctccggcgatggatggaacgcaatcagagacatggttgtccgtggcgctcctgcgattgccatagcagcggctttggctctggctgtagaggtttctgggttggaggatttcaccggtacgcctgcagaggcagcagcttttgtttccgagaaattggagtaccttgtatcgagccgcccaactgcagtgaacctatctgatgctgcaaacaagcttcggagtttagtttcaaggacagcagaaactgagaaagatgccaaagcaatctttcaggcctacattgatgcagcagagaccatgctagttgacgatgtgtcagataacaagggcaattggctctcatggagctga

SEQ ID NO: 157 - DNA, 1125 bp, Oryza sativa
atgggcgaattgggtgctctccagtccatcgtctaccaccgcggatcgctccgcctgcttgatcagaggaagctcccactcgaggtggactacatcgacgtcaagtgctccggcgatggatggaacgcaatcagagacatggttgtccgtggcgctcctgcgattgccatagcagcggctttggctctggctgtagaggtttctgggttggaggatttcaccggtacgcctgcagaggcagcagtttttgtttccgagaaattggagtaccttgtatcgagccgcccaactgcagtgaacctatctgatgctgcaaccaagcttcggagtttagtttcaaggacagcagaaactgagaaagatgccaaagcaatctttcaggcctacattgatgcagcagagaccatgctagttgacgatgtgtcagataacaaggcaattggctctcatggagctgagtttctcaaacagaaacttgaggtctctaaagatatttctgttctaacacactgtaatactggcagtcttgcgactgctggttatggaactgccttgggggttattcgtgctcttcactctggaggaattctagagaaggccttttgcactgaaactcgtccatttaaccagggttccaggcttacagctttcgagttagttcacgacaaagtacccgcaacgctgatagcagattctgctgcagctgcactgatgaagagcgggtgtattcaagctgtaatcgttggagctgatcgtatcgctgccaatggtgatactgctaacaagattggcacatacaacctcgccatttctgcgaagcatcacggtgtgcaattctacgtggctgcgccgataacttcgattgatctctccctcccatctggtgagcaaattgtgatcgaagagaggtctcccaatgagttgctgaactctgaaggtggcctaggtaagcaagtcgccgcgtcaggtatatcggtgtggaaccctgccttcgatgttactccggcaaatctgattaccgcaatcataacggaaaagggtgtgatcacaaagtctgatgctgatgagactttcaacatcaaagatttcatccagtctgcaaaattgtactctaccatgcagtga

SEQ ID NO: 158 - DNA, 1116 bp, Ostreococcus taurii
atggcgacgctggaggcgatcgcctacgtccgcggctccctacgagtgctcgatcagctccgtctgccgctcgagacgacgtacgtggacgtcccgacgtgcgaggcgtgttggcgatgcatcaaggacatgcgcgtccgaggggcgccggcgatcgcgatcgcggcggcgctggcgctggcgacggagctggagcgcacgcgcgggcggtttcgcgcgagcgcggaggtcgcggcgttcgcgcgggaacggttcgattacatgtacacgtcgagaccgacggcggtgaacctgggagaggcgcgggggcggattcagaaagtcgcgatgacgctggcggagacgtgtgatgtgacggagacgatcgatggggtgatcgaggcgtgcgaggcgatgttggaggaggatgtgcgatcgtgtcgggaaatcggacgacgcggcgcggaggcgttgttggcgagcgtgggcgcgaaagatggggagaagatcaaggttatgacgtgttgtaacaccgggtcgctcgcgacggcgggatacgggaccgcgctcggggtgattcgggcgctgtgggagcgaggtcggctcgagcgggcgtactgcctggagacgcggccgtacaatcaaggatcgagattgaccgcgtacgagctcgtgtacgaaaaaattccgggcacgctcatctgtgataatatggcggcggcgctcatggcgcgaggggatgtcgacgccatcgttgtcggcgcggacagggtcgccgcaaacggggactttgcgaacaaaattggcacctactcgctcgcggtaaacgccaagcatcacggtgtgcccatgttcaccgcggcgccggtgacgacgctggacccggagacggcgactggagcggacattcacatcgaggagagaccggcggatgaggtgacacattcgctcggtaaacgcgtggcggcggagggcatcgacgtgtggaatccatccttcgacgtcactcccgccgcgctcctctcgggcatcatcaccgagagcggcgtcatcgaaaaaaatgtgaaaggattctttccaagacttggagcgtctttgagaggcggttcctggagcaatggaacgagcaaggcgtga

SEQ ID NO: 159 - DNA, 1155 bp, Pinus pinaster
atggctgctgaattgaagcaaaacggggaggatagtactttgcagtcaattcgatattcgaggggtcgcttgcagcttctagaccagagaaagctaccccatgattctgtttatatcgacattcaagattctacagcaggatggcatgctatacatgatatggtggttcgtggtgcccctgcaattgccatatcagctgcactttcactagcagtagaggttgctaatttgggtccagtggattggagtgtgaatgatgctatctcatttttgcaaaaccgtttagaattccttgtttctagccgtccaacagcagtcaatctttcagatgctgcgacaaagttgaatgaagtggtgctaaaggcagccaatgatatgtccaaacctgaagctatttttcaggcatatattgaagctgctgaagttatgctgatggctgatattaatgacaataaagcaattggttcaaatggggcgaagtttattctaagtcaacaccagaagcgtcacaatcttcatgttttgactcattgcaacacgggaagccttgcaacagctggatatggtactgctcttggtgtcattcgtgccttacactcagagggattgctggaaactgctttttgcacagaaactcgaccatataaccaggggtcgaggcttactgcatatgaactgatccatgaacatataccagcagtgctcgtagcagattctgcagctgctgcattgcaaaaatcaggtcgtgtagatgcaatagttgttggggcagacagaattgctgaaaatggtgatacggcaaacaagataggaacatataatctggcaatatcagctttccaccatggtataccgttttatgtagctgctcctttgacctcagttgatctgtctctttcctctggtgagaaaataataattgaggagaggtcaccaaaggaattaactcatgctcttggaggccaagggcagcaggtagctccatctgggatctctgtttggaaccctgcatttgatgtgactcctgcaaatcttattacagccattattactgaaaagggtgtcattacaaagaaggattcaagcagtactttcgacataaagggatttgtagagagttttagagtacctattacaacggaaacaaacatatga

SEQ ID NO: 160 - DNA, 2454 bp, Phaeodactylum tricornutum
atgacagactcttccccttccagcttacgatcgctcatttatgatccttctggcccttcgttaaaagttttggatcagctaaaagtccctgcagaaaaggcttacattgatgtaacggacattcagacagcgtggtccgtcattcgcaatatgcagattcggggtgcccctttgattgcgattgtagccagtctcggactcgctgttgatttggtcagccctgcatccaccatggatctcgattcaatgatttccatgcacggtgatagacacggaccagtgattctgtcgtatattcaaggcaagattgattatctcgaaacgtcccgacccacggcagtcaacttgttcaatgctctgtccgaactccgacaagcccttcttcacgcccacgacgaaactagcacaaccaagacatcgacggattcgccccgcgaacgcatggtgcaggctgtgatgaagcacgccgaattcatgctggaacgcgatatgaaggattgtcaacgaattggccaacatggagcggatgagattctccgtgacgcggtaaacaaggtcacgatcttgacgatctgcaacacgggggccttggcgtgctcggcgtacggcaccgcgctcggtgtcgttagggcagttcgcgagcgaggacaactcaagtccattattgccttggaaacgcgtccttacaatcaaggatcccgcttaacggcgttcgagattgttgaagaagatatgccgggaggtattctcatttgcgacagtatggctgcagcgcttatgaaaaaaggcggcgtcgatgccgtcgtagttggagccgatcgggtctgtgcaaatggcgatacggccaacaaaatcggcacttactcgctggcgctagtcgcggccgcccacgatgtcccagtctacgttgcggctccgtttaccacgctggacgtttccttgacgcacggcgatcaaatcgtgattgaagagcgacccggcgacgaactcatttctaccagtcaagcaccgtccagtattgctgtttggaatccagcgtttgatgtgacacctgcgcgctatttggctggcatcataacagaaaagggtgtcattcgacccactgtggatggagtgatggacgtggcgagttttgtggcccgccatcaggacgagggcgcatctatagaaggcgtgcccgcagatatgatcaaactcaaggtaccgcacgactactctgagcagtcaaccaaaacattgccttctttcttgatcaaaaatgctcctaaagtcatggatattttgggcacaacatgtgtggacgatttggaatgtgtcgaagtaggagacggaaatctgaatctagttttcatcgtggcaaatcacaaaagcggaataaaaatgattgtgaaacagtctctaccatacgtgcgctgcgtgggccactcatggcctctgacgcttgaacgctcctttttcgagtacaaggcgttggtagccgaaaaagaagcgtgtcctaactttgttccttcggtttactacttttccaaatccaacggaatcatcgccatggaatacttggcccctccttgtatcattttgcgtaaaggccttattcagggcattcgctacccaactatggcagccgatatgggtacattttgcgcacaaacctttttcaaaacaagcggcttccgactttcaccgacgcagttgcgccaacaggtgcagttttggagtcgcaacgtcgaaatgtgtgcattgaccgagcaagtagttttcactgaaccatacatgcaggccgacaacaatcactggacgaccccgcagttggatgaagataagaaggcgattgagaatgacaacgtactcaaagtggcggcggcaatgtggaaggccaagtttttgtccaaaactcaatcgttgatccacgccgatttacataccgggtcggtcatgtgtgcaccagagcctggtaaaacctacgtgattgatccggaatttgccttttacggaccaatgggtttcgacacaggtgcttttgtggcgaatctagtattagcatatgtttcgcagcccggccacgctaatggcgatgactatgctacctggattttagagcagatcgctgtcttctggaacacactcgttgcgcaatttgtggctctctggaaagacccgttggagcatacaggtttcctgtacggtgccgaaaccctcgaatctgcatcctatgagtgtcaagtagccttcttttccgaccttttgaccgatacgctcggttttgcaggaatgaagatgctgcggcgtgttgtcggcatcgctcacgtggaagacttggaaagcattgaggacgcggaagtccgatcccagtgtgaacggcgtgccattgaaattgccaaaaagtttatcaagtcggctgaatcatttagatcgatcgaggaagccatagagtgtgcgcgtagtcagcagtaa

SEQ ID NO: 161 - DNA, 1104 bp, Sorghum bicolor
atggtgggatccgacgcgctgcagtccatcgtctatgcccgtgggtcgctccggctcctcgatcagaggaagctgccgctcgacatggactacatcgacgtcaagaattcagtcgatggctggaatgcaataagagatatggttgtccgtggtgctccagcaatagccatagcagcggcactagcattagctgtcgaagtttctgatttagatttcattggtacgcctggagaagcagcttcttttgtttccaagaaattggaataccttgtatccagccgaccaactgcagtgaacctatctgatgctgcaacaaagctccaaactttggtatcaaaggcagctgaaactgcaaaagattccaaagctatctttcaggcctacattgaggccgcagagacaatgcttgttgatgacgtggcagataataaagctattggctcacatggagctgaatttcttcaaaggcagcttgcaaattcagaaaagatatctgttctaacccattgtaatactggcagtcttgcaactgctggttatggaactgccctcggggttatacgtgctcttcattctgggggagttttagagaaggccttttgcaccgaaactcgtccatttaaccagggatccaggcttacagctttcgagttggttcatgaaaaaatacctgcaacactgatagcagattctgctgctgctgcattgatgaaacaagggcatgttaaggcggtcatcgttggtgctgatcgaatagcagcaaatggtgacacagccaacaagattggcacatacaacctcgccatctccgcgaagcatcatagcgtccagttctatgtggcagcgccagtaacttccattgatctctccctcccatctggagatgaaatagtcatagaggaaagatcacccaaggagttgctgaactctgaaggtggtctgggaaagcaagttgctgcatccggtatatcagtctggaaccctgctttcgatgttactccagcaaatctgatcactgcaatcataacagaaaagggtgtgatcacaaaaactgatgctgatggatctttcgacatcaaaggattccttcagcctgcaaaataa

SEQ ID NO: 162 - DNA, 1104 bp, Sorghum bicolor
atggtgggatccgacgcgctgcagtccatcgtctatgcccgtgggtcgctccggctcctcgatcagaggaagctgccgctcgacatggactacatcgacgtcaagaattcagtcgatggctggaatgcaataagagatatggttgtccgtggtgctccagcaatagccatagcagcggcactagcattagctgtcgaagtttctgatttagatttcattggtacgcctggagaagcagcttcttttgtttccaagaaattggaataccttgtatccagccgaccaactgcagtgaacctatctgatgctgcaacaaagctccaaactttggtatcaaaggcagctgaaactgcaaaagattccaaagctatctttcaggcctacattgaggccgcagagacaatgcttgttgatgacgtggcagataataaagctattggctcacatggagctgaatttcttcaaaggcagcttgcaaattcagaaaagatatctgttctaacccattgtaatactggcagtcttgcaactgctggttatggaactgccctcggggttatacgtactcttcattctgggggagttttagagaaggccttttgcaccgaaactcgtccatttaaccagggatccaggcttacagctttcgagttggttcatgaaaaaatacctgcaacactgatagcagattctgctgctgctgcattgatgaaacaagggcatgttaaggcggtcatcgttggtgctgatcgaatagcagcaaatggtgacacagccaacaagattggcacatacaacctcgccatctccgcgaagcatcatagcgtccagttctatgtggcagcgccagtaacttccattgatctctccctcccatctggagatgaaatagtcatagaggaaagatcacccaaggagttgctgaactctgaaggtggtctgggaaagcaagttgctgcatccggtatatcagtctggaaccctgctttcgatgttactccagcaaatctgatcactgcaatcataacagaaaagggtgtgatcacaaaaactgatgctgatggatctttcgacatcaaaggattccttcagcctgcaaaataa

SEQ ID NO: 163 - DNA, 513 bp, Saccharum officinarum
atggtgggatccgacgcgctgcagtccatcgtctacaaccgtgggtcgctccgcctccttgatcagaggaagctgccgctcgagatggactacatcgacgtcaagaattccgtcgatggctggaatgcaataagagacatggttgtccgtggtgctccagcaatagccatagcagcggcactagcattagctgttgaagtttctgatttagatttcattggtacgcctggagaagcagcttcttttgtttccaagaaattggaataccttgtatccagccgaccaactgcagtgaacctatctgatgctgcaacaaagctccaaactttggtgtcaaaggcagctgaaactgcaaaagattccaaggctatctttcaggtctacattgaggccgcaaagacaatgcttgttgatgatgtggcaaaaaataaaacctatgggctcacatggagctggatttcttcaaaggcagcttgcaaattcaaaaaagatatctgttctaacccatggtaa

SEQ ID NO: 164 - DNA, 1104 bp, Triticum aestivum
atgggggaatccagcgcgcttcagtccatcctctacgaccgcggcgcgcttcgcctcctcgatcagaggaagctgcccctcgaggaggtctacatcgatgtcaaggactccgcggatggatggaatgcgatcagagacatggttgtccgtggtgctcctgccatagccatagcggcacgactatcattggctgtggaagttaatgatcacgatttcactggtacacctgtggaagcagcctcattcgtttccaagaagttggaataccttgtatccagccggcccacagcagtgaacctgtctgatgctgctacaaagcttcagaacttagtgtcaagaacagctgaaacagcaaaagatgccaaatctatctttcaggtctttattgaagctgcagaggctatgctagttgatgatgtggccgataataaggcaattggctcgcatggagctgaattccttcaacgccagcttggaagttcgagaaacatctctgttctaacccattgtaatactggcagccttgcaaccgctggttacggaactgccctaggggtcattcgtgctcttcactctggaggagttttggaaaaggccttctgcactgaaactcgtccatttaaccagggttccaggcttacagccttcgagttagttcatgacaaaatacctgcgacgctgatagcagactctgctgcagctgcacttatgaataatggacaagttcaagctgtaattgtgggtgctgatcgtatagctgcaaatggtgacacagccaacaagattggcacatacaacctctcgatttctgcaaagcatcacggcatgcagttttacgtggccgcaccagtaacttcgattgatctctccctcccgtctgggaagcaaatcgtcatagaagaaagatctccaaaggaattgttgaactctgaaggtggtctaggaaagcaagttgccgcgtcaggtatatcagtctggaaccccgccttcgacgttactccagcaaatctaattactgcaatcattacagaaaagggtgtgatcacaaagtctgatcctaatggaagtttcgacatcaaaggtttcatcgaacgtgccaagtga

SEQ ID NO: 165 - DNA, 453 bp, Triticum aestivum
atgggggaatcgagcgcgcttcagtccatcctctacgaccgcggggcgcttcgcctcctcgatcagaggaagctgcccctggaggaggtctacatcgatgtcaaggactccgcggatggatggaatgcgatcagagacatggttgtccgcggtgctcctgccatagccatagcggtagcactatcattggctgtggaagttaatgatcacgatttcactggtacacctgtggaagcagccttattcgtttccaagaagttggaataccttgtatccagccggcccacagcagtgaacctgtctgatgctgctacaaagcttcagaacttagtgtcaagaacagctgaaacagcaaaagatgccaaatctatctttcagcagggtagtttgggccaccatttttgcaccagtgtctcagactactgcaggttggtttcaataggtccttattga

SEQ ID NO: 166 - DNA, 1104 bp, Triticumaestivum
atgggggaatccagcgcgcttcagtccatcctctacgaccgcggcgcgcttcgcctcctcgatcagaggaagctgcccctcgaggaggtctacatcgatgtcaaggactccgcggatggatggaatgcgatcagagacatggttgttcgtggtgctcctgccatagccatagcggcagcactatcattggctgtggaagttaatgatcacgatttcactggtacacctgtggaagcagcctcattcgtttccaagaagttggaataccttgtatccagccggcccacagcagtgaacctgtctgatgctgctacaaagcttcagaacttagtgtcaagaacagctgaaacagcaaaagatgccaaatctatctttcaggtctttattgaagctgcagaggctatgctagttgatgatgtggccgataataaggcaattggctcgcatggagctgaattccttcaacggcagcttggaagttcgagaaacatctctgttctaacccattgtaatactggcagccttgcaaccgctggttacggaactgccctaggggtcattcgtgctcttcactctggaggagttttggagaaggccttctgcactgaaactcgtccatttaaccagggttccaggcttacagctttcgagttagttcatgacaaaatacctgcgacgctgatagcagactctgctgcagctgcacttatgaataatggacaagttcaagctgtaattgtgggtgctgatcgtatagctgcaaatggtgacacagccaacaagattggcacatacaacctctcgatttctgcaaagcatcacggcatgcagttttacgtggccgcaccagtaacttcgattgatctctccctcccgtctgggaagcaaatcgtcatagaagaaagatctccaaaggaattgttgaactctgaaggtggtctaggaaagcaagttgccgcgtcaggtatatcagtctggaaccccgccttcgacgttactccagcaaatctaattactgcaatcattacagaaaagggtgtgatcacaaagtctgatcctaatggaagtttcgacatcaaaggtttcatcgaatgtgccaagtga

SEQ ID NO: 167 - DNA, 1122 bp, Thalassiosira pseudonana
atgaccgacccagcaaacaccctccgctccctcatctttgatgtggactctgccaccaacaaagcaaccctctccgtcctcgatcagctccgtctacccgatgaaacgatgtacactaaaatcgtcaacgtccaagacgcttgggacgcaatacgctcgatgcgtatccgaggtgcaccgttgatcgccgtcgttgcagtgctaggattggctgtggatctgtcttccaatgagctcactattggtgaattggatttaattagtggtatcgatgaagtcaaagcgtttgtaacgacaaagatggagtacctgaagacatctcgtccaacggcagtgaatctattcaacgctatggatgaactcaaatccttcatcgacgacgatgccatcaaaacacgggaggaggtagtgtccgccatcgttcaacatgcatatttaatgcttgagcgagatgtatctgacaacaaagccattggatcacacggtgcagatgatttgctatctcgacatgtccatcctgagggagtatgtgtagttaccatttgcaatacggggagtttggcaactgctggttgggggacggctttgggtgtggcgagggagttgcagagaagggggaagttgaggagtattgctgctctggagaccaggccttacaatcaaggatcacgtctcactgcttacgaaatcatgcaagagcaaatgcccaacccaatacttctctgcgattccatggctgcctcttacctcaaatccaaaggagccgacgtctgcgtagtaggagctgaccgagtctgtgctaacggtgacactgcaaacaaaattggaacctttcaactatcaatcattgcaaaggagatgggagttgagttctttgtcgccagcccgttcactactttggacgttgagttggaaagtggagatatgattgaaattgaagagcgacctgacggggagatgttggaaagtagtggtgctccgaaaggaatgaagtgttggaatcctgcgtttgatgtgacgcctgcaaagtatatcagtggaatcattaccgagaagggagtgctcaaaccgtcggccgatggtacgtttgacgtcaagggatttgtttccatgcattcgtga

SEQ ID NO: 168 - DNA, 1206 bp, Volvox carteri
atggcgcccgaaggaagtccatcatcgctccaagcgattaggtacacacgcggcagcttgcagctgttggatcagaggctgctgcctttccaaacggcgtatctagatgtcccagatgtgaaagcagcatggacgcaaattcgcgatatggtcgtgcgtggagcgcctgcgattggttgtaccggtgcacttgcgatggcggtggagcttcaaactcataaaggcgctggaacagagtttagctcggtgaaggaggcaacggattatattaattctactttggattatcttgttaccagccgccccacggcagtgaacctggcggatgccgccaacaagctcaaggccgcagctgcacttgccgccgcagctgatgctgccaccccctcctcggtctgctctgccgtcatggacgcagcggaggcatacttcgtagaggatattgcatccaacaaggcaatgggtgctacaggcgctgctgcgttgctggcggccgctcatgctcggggtcggggggttggggggaagctgcgcgtgctgacgcactgcaataccggcagcttggcgacggcagggtacggcaccgcgttgggagtcattcgggcattacatgagcagggcaccctggagcatgcgttttgtacggaaacgcggccgtacaatcagggtgctcgtctcaccgcctttgagttggctcacgaccagctgcccgccacgctcatctgcgactccgcggctgctgcgctgatggcatcagggcaggtggatgcggtcgtggtgggggcagaccgtgttgttgccaacggcgacacggccaacaagatcggcaccaagtcgctgtccatctccgccgcccacttcaacatccccttcttcatcgccgcccccaccaccaccctcgacccccacctgccctccggggaccacatcgtcattgaacagcgcacccacgaggaggtgacccacttcaggggcatccgggtggcggctgagggagtcaatgtgtggaacccctcgttcgacgtggcgccgtgcggcctcattgagggtatcattacggagcggggcatgatacccaagaccaaggatggggtgtttcaggtgagtagcagggagaggggaaaggggggaggcagggaggacggtctgctgaatagcctctgggatgaaaatacggagagggaatacggcacacgagtaggctag

SEQ ID NO: 169 - DNA, 852 bp, Zea mays
atggtgggatccgacgcgctgcagtccatcgtttacagccgtgggtcactccgcctcctcgatcagaggaagctgccgctcgagatggagtacatcgacgtcaagagttccgccgatggctggaatgcaataagagacatggttgtccgtggtgctccagcaatagccatagcagcggcactagcattagccgttgaagtttctgatttagattttattggtacgcctgaagaagcagcttcttttgtttcaaagaaattggaataccttgtatccagccgaccaactgcagtgaacctatctgatgctgcaacaaagctccaaactttggtatcaaaggcagctgaaactgcaaaagattccaagtctatctttcaggtctacattgaggccgcagagacgatgcttgttgatgatgtggcagataataaagctattggctcacatggagctgtatttcttcaaaggcagcttgcaaattcaaaaaagatatctgttctaacccattgtaatactggcagtcttgcaactgctggttatggaactgcccttggggttatacgcgctcttcattcggggggagttttagagaaggccttttgcaccgaaactcgtccatttaaccagggatccagacttacagctttcgagttagttcatgaaaaaatacctgcaacactgatagcagattctgctgctgctgcgttgatgaaacaagggcatgttcaggctgtcattgttggtgctgatcgaatagcagcaaatggtgacacagccaacaagattggcacatacaacctcgccatctccgcgaagatcatagcgtccagttctatgtggcagcgccggtaa

SEQ ID NO: 170 - DNA, 780 bp, Zea mays
atggtgggatccgacgcgctgcagtccatcgtttacagccgtgggtcactccgcctcctcgatcagaggaagctgccgctcgagatggagtacatcgacgtcaagagttccgccgatggctggaatgcaataagagacatggttgtccgtggtgctccagcaatagccatagcagcggcactagcattagccgttgaagtttctgatttagattttattggtacgcctgaagaagcagcttcttttgtttcaaagaaattggaataccttgtatccagccgaccaactgcagtgaacctatctgatgctgcaacaaagctccaaactttggtatcaaaggcagctgaaactgcaaaagattccaagtctatctttcaggtctacattgaggctgcagagacgatgcttgttgatgatgtggcagataataaagctattggctcacatggagctgtatttcttcaaaggcagcttgcaaattcaaaaaagatatctgttctaacccattgtaatactggcagtcttgcaactgctggttatggaactgcccttggggttatactcgctcttcattcggggggagttttagagaaggccttttgcaccgaaactcgtccatttaaccagggatccagacttacagctttcgagttagttcatgaaaaaatacctgcaacactgatagcagattctgctgctgctgcgttgatgaaacaaggggcttacacatgcttatttcgaggcagattttcttctggtggatatattgttgtttcatga

SEQ ID NO: 171 - DNA, 1104 bp, Zea mays
atggcggcatccgacgcgctgcagtccatcgtttacagccgtgggtcgctccgcctcctcgatcagaggaagctgccgctcgagatggagtacatcgacgtcaagagttccgccgatggctggaatgcaataagagacatggttgtccgtggtgctccagcaatagccatagcagcggcactagcattagccgttgaagtttctgatttagattttattggtacgcctgaagaagcagcttcttttgtttcaaagaaattggaataccttgtatccagccgaccaactgcagtgaacctatctgatgctgcaacaaagctccaaactttggtatcaaaggcagctgaaactgcaaaagattccaagtctatctttcaggtctacattgaggccgcagagacgatgcttgttgatgatgtggcagataataaagctattggctcacatggagctgtatttcttcaaaggcagcttgcaaattcaaaaaagatatctgttctaacccattgtaatactggcagtcttgcaactgctggttatggaactgcccttggggttatacgcgctcttcattcggggggagttttagagaaggccttttgcaccgaaactcgtccatttaaccagggatccagacttacagctttcgagttagttcatgaaaaaatacctgcaacactgatagcagattctgctgctgctgcgttgatgaaacaagggcatgttcaggctgtcattgttggtgctgatcgaatagcagcaaatggtgacacagccaacaagattggcacatacaacctcgccatctccgcgaagcatcatagtgtccagttctatgtgtcagcgccggtaacttccattgatctctccctcccatctggggatgagatagtcatagaagaaagatcaccaaaggagttgctgaactctgaaggtggtctgggaaagcaagttgctgcatccggtatatcagtctggaacccagctttcgatgttactccagcaaatctgatcactgcaatcataacagaaaagggtgtgatcacaaaaactgatgctgatggatctttcgacatcaaaggattccttctgcccgcaaaataa

SEQ ID NO: 172 - DNA, 1125 bp, Arabidopsis thaliana
atgtccggcgaaggagacacgaccctcaaagctatctgttacaagcctggctctctccagttactcgatcagaggaagcttcctttagagactatttacttagagattcgtgatgcttcagatggatggagtgctattcaggaaatggttgtacgtggtgctcctgctatagctattgctgctgctctttctttggctgttgaagttttcaactttcatggttttgatggatcagcttcagatgctgttgcttttcttgagaacaagttggattatttagtgtcaagccgtccaacagcagttaatcttgcagatgctgctttgaaacttaaacatgttatagcaaaggccttggctactgccaccgaagccaaatccattttcaaggcatatattgaagctagtgaggatatgcttgaagatgatgttgtttcaaacaaagctataggaaactttggtttaagcttgttgaggcaacaagccaagaatcctgataagctttctgttttgacccattgcaacactggcagccttgctaccgccggatatggtactgccctcggtgtcatccgtgcactccatactcaaggaatcttagaaagagcatactgcacagaaactcgtccatttaatcaaggatcgaggcttacagcgtttgagttggtgcatgagaaaatccctgcaactctcattgcagactcagctgcagctgcactgatgaaagatggtcgtgttgatggtgtcatcgttggagctgatcgtgtggcttcaaatggcgatactgctaacaagattgggacttacagtctcgccttgtgcgcaaaacatcacgggatcccattttatgttgctgcacctcttacctcagttgatctgtcactttcatccgggaaagaaatcgtgatagaggaaagatctccaaaggagttgatgcacacacacggaggacttggtgaacgcattgcagcaccagggatctcagtttggaacccagcttttgatatgactccagcagagctgattgcaggaatcataaccgagaaaggggtcataacaaagaatggcaatgatacatttgacataagcagctttgccaagaagataacaggaaactcatctcgttga

SEQ ID NO: 173 - DNA, 702 bp, Brassica napus
atgtccggcgaaggagacaccaccctcaagtctatctgctacaagcctggctctctccagttactcgatcagaggaagcttcctttggagactacttacttagagatccgtgacactgcagatggatggagtgcgatacaggagatggtggtacgtggtgctcctgcgatagccattgctgcagctctctctttggctgttgaagtttccaactttagtggcttcgatggatcatcggcagaagcggttgctttccttgagaagaagttggattatttggtgtcaagccggccaacagctgttaatcttgcagatgcttccttgaaacttaaacaagttatagctaatgccttggcttcttctgccgctgaaccgaactccattttcaaggcatatattgaagctgctgagaatatgctcgaagatgatgtcgcgtcaaacaaagcaatagggacctttggttcaagcttactgaggcagcaagccaaaaatcctgataagctttctgttctgacccattgcaacaccggcagccttgctactgccggatatggaactgccctgggtgttatccgtgcactccacactcaaggagtcttagaaagagcatactgcacagaaactcgtccattcaatcaaggatcgaggcttacagcgtttgagttggtgcatgaaaaagatccctgcaacgctcattgctga

SEQ ID NO: 174 - DNA, 1047 bp, Citrus clementina
atggctcttgattccgtttcgaccgacaacaactctcttcagtccatttgctacaggcgtggctcccttcagcttctcgaccagagaaagcttcctctggaaactatttatttggaaattcgcgattctgccgatggatggtctgcaatacgggaaatggtggtgcggggggcgcctgccattgctatggcagcggcactttccctggcagtggaggtgtttaatttgaatgcatttagtgggactgctgccgatgcagcttcatttcttggcaataagttggaatatcttgtctctagtcgaccgactgcagtgaatctttcagatgctgccgcaaaactcaaagaaatcatatcaaaggctgccgctactgcttcagaagccaatagtgtatttcaggcctacatagaagctgctgaaattatgctcaaagatgatgttgctacaaacaaagctattggttcttatggggcaagttttcttcagaaccagctcaaaaattctaaattctctgttcttactcattgcaacactggcagtcttgcaacagctggatatggtaccgcccttggtgtgatccgtgcacttcattctgagggagtgttagaaagagcttattgctctgaaacacgtccattcaaccaaggatctagactcactgcttttgagttggtacatgatcgcataccagctactcttatagccgactctgctgcggctgcattgatgaaagatggtcgtgtgagtgctgtcattgtcggagcagatcgagtggctgcaaatggtgacactactaacaagattggaacctacagccttgcattatgtgcaaaagttcataatattctgttttatgtggctgctccactgacgtcaattgatttaaccctttcttctggaaaaaagatgtcaaaaaaggagaggtctgctaaagaaatgttgtgctctcaagggagacttggtggaaaaagtaactgcatccggaaaccctggcggggaaccgggcttttaagttttcccccacttaaattgattcatgggaaataa

SEQ ID NO: 175 - DNA, 702 bp, Citrus clementina
atggctcttgattccgtttcgaccgacaacaactctcttcagtccatttgctacaggcgtggctcccttcagcttctcgaccagagaaagcttcctctggaaactatttatttggaaattcgcgattctgccgatggatggtctgcaatacgggaaatggtggtgcggggggcgcctgccattgctatggcagcggcactttccctggcagtggaggtgtttaatttgaatgcatttagtgggactgctgccgatgcagcttcatttcttggcaataagttggaatatcttgtctctagtcgaccgactgcagtgaatctttcagatgctgccgcaaaactcaaagaaatcatatcaaaggctgccgctactgcttcagaagccaatagtgtatttcaggcctacatagaagctgctgaaattatgctcaaagatgatgttgctacaaacaaagctattggttcttatggggcaagttttcttcagaaccagctcaaaaattctaaattctctgttcttactcattgcaacactggcagtcttggcacagctggatatggtaccgggcttggtgtgatccgtgcacttcattctgagggaagtgtagaaagagcttattgctctgaaacacgtccatcaaccaaagatctagactcactgcttttgagtgggtacatgatcgcataccagctactcttataa

SEQ ID NO: 176 - DNA, 678 bp, Citrus clementina
atggctcttgattccgtttcgaccgacaacaactctcttcagtccatttgctacaggcgtggctcccttcagcttctcgaccagagaaagcttcctctggaaactatttatttggaaattcgcgattctgccgatggatggtctgcaatacgggaaatggtggtgcggggggcgcctgccattgctatggcagcggcactttccctggcagtggaggtgtttaatttgaatgcatttagtgggactgctgccgatgcagcttcatttcttggcaataagttggaatatcttgtctctagtcgaccgactgcagtgaatctttcagatgctgccgcaaaactcaaagaaatcatatcaaaggctgccgctactgcttcagaagccaatagtgtatttcaggcctacatagaagctgctgaaattatgctcaaagatgatgttgctacaaacaaagctattggttcttatggggcaagttttcttcagaaccagctcaaaaaatctaaattctctgttcttactcattgcaacactggcagtcttgcaacagctggatatgggaccgcccttggggtgatccgtgcacctcattctgaaggaatggtaaaaagagcttattgctctgaaacacgtcccttcaaccaagatctagactcactggtttttaattgtacctga

SEQ ID NO: 177 - DNA, 882 bp, Citrus clementina
atggctcttgattccgtttcgaccgacaacaactctcttcagtccatttgctacaggcgtggctcccttcagcttctcgaccagagaaagcttcctctggaaactatttatttggaaattcgcgattctgccgatggatggtctgcaatacgggaaatggtggtgcggggggcgcctgccattgctatggcagcggcactttccctggcagtggaggtgtttaatttgaatgcatttagtgggactgctgccgatgcagcttcatttcttggcaataagttggaatatcttgtctctagtcgaccgactgcagtgaatctttcagatgctgccgcaaaactcaaagaaatcatatcaaaggctgccgctactgcttcagaagccaatagtgtatttcaggcctacatagaagctgctgaaattatgctcaaagatgatgttgctacaaacaaagctattggttcttatggggcaagttttcttcagaaccagctcaaaaattctaaattctctgttcttactcattgcaacactggcagtcttgcaacagctggatatggtaccgcccttggtgtgatccgtgcacttcattctgagggagtgttagaaagagcttattgctctgaaacacgtccattcaaccaaggatctagactcactgcttttgagttggtacatgatcgcataccagctactcttatagccgactctgctgcggctgcattgatgaaagatggtcgtgtgagtgctgtcattgtcggagcagatcgagtggctgcaaatggtgacactactaacaagattggaacctacaggcttgcattatgtgcaaagtttcataatattctgttttatgtgggctgctcccctgacgtcaattga

SEQ ID NO: 178 - DNA, 1032 bp, Citrus clementina
atggctcttgattccgtttcgaccgacaacaactctcttcagtccatttgctacaggcgtggctcccttcagcttctcgaccagagaaagcttcctctggaaactatttatttggaaattcgcgattctgccgatggatggtctgcaatacgggaaatggtggtgcggggggcgcctgccattgctatggcagcggcactttccctggcagtggaggtgtttaatttgaatgcatttagtgggactgctgccgatgcagcttcatttcttggcaataagttggaatatcttgtctctagtcgaccgactgcagtgaatctttcagatgctgccgcaaaactcaaagaaatcatatcaaaggctgccgctactgcttcagaagccaatagtgtatttcaggcctacatagaagctgctgaaattatgctcaaagatgatgttgctacaaacaaagctattggttcttatggggcaagttttcttcagaaccagctcaaaaattctaaattctctgttcttactcattgcaacactggcagtcttgcaacagctggatatggtaccgcccttggtgtgatccgtgcacttcattctgagggagtgttagaaagagcttattgctctgaaacacgtccattcaaccaaggatctagactcactgcttttgagttggtacatgatcgcataccagctactcttatagccgactctgctgcggctgcattgatgaaagatggtcgtgtgagtgctgtcattgtcggagcagatcgagtggctgcaaatggtgacactactaacaagattggaacctacagccttgcattatgtgcaaagtttcataatattctgttttatgtggctgctccactgacgtcaattgatttaaccctttcttctggacaagagattgtcatagaggagaggtctgctaaaagaattgttgtgctctcaagggagaactgggtgaaccaagtagctgcatctgggatctctgtctggaacccggcttttgatgtaccccagctaaattga

SEQ ID NO: 179 - DNA, 1116 bp, Carthamus tinctorius
atgggatctcaagatgattcatctctgcaatccatccgttatgtccgtggctcacttcaactacttgatcagagaaaacttcctcttgataccatctatttggaaattcgaaacgctgccgagggctgggaggcaataagagagatggtggttcgtggggcacctgcaatcgccatagctgcagcactttctttggctgtaggagtatctaaactcgaaggatttaatggaaccccatatgaggctgcatcttttcttgaaaagagattggaatatcttgtctcaagtcgtccaacagcagtgaatctttcagatgctgctactaaacttacagagatcgtaaagaactctgctgcaactgctacagatgacaatcaagtgttccaagcttacattgtagctgctgaaatgatgctggaagatgatgttgcttccaataaagcaatcgggtcatacggatcttctttcattcagaatcaaaaaaaggattttaagaaactatctgttttaacacattgcaatactggcagtcttgcaacagcgggatatggaaccgctcttggagtaattcgatcactttatgccgatggagtactagaaagtgcttattgcactgaaacccgcccatttaaccaagggtcaagattaacggcttttgagttggtgcatgacaaaataccagcgactctgatagcagattctgcagccgctgcattaacgaaagctggacgtgtgcatgctgtcatcgttggagctgatcgtgttgctgctaatggtgacactgccaacaagatcggaacctatagcctggctttatgtgctaagcatcacggcgttctgttttacgttgctgcacccttgacttcggtcgatttatctctgtcttctggagacgagattgttatcgaagaaagatcagccaaggaattactaaacacccgcggaggtcttggggaacaagttgcagcttcgggaattgctgtttggaatccagcttttgatgttacaccagcttgtttgataaatggtatcataactgaaaagggtgtgattacaaagattgagaatgaggtttttgacatcaagggttttgtgcagacgactttgagcaactaa

SEQ ID NO: 180 - DNA, 861 bp, Glycine max
atggcatttgagtccaacgaagttgcagccacaacgctccaagccatatgctacaagcgcggttccctccagcttctcgatcagagaaagctccctctggagacagtttacttggaaattcgggattcaacggatggctggaatgccatacgggaaatggtggtccggggagcacctgctattgcaattgcagcggcactctctttggctgtggaggtgttcaatttagattttaatgggtcagctactgatgctgtatccttgctgcagaagaaattagaatatcttgtcacaagtcggccaactgcagtgaacctatcagatgctgcgacaaaactcaaagaagtgatatcaaatgctgctgctaccacttcagagggaaggagtgttttccaagtgtatatagatgctgctgaagttatgcttgaggatgatgttgcgtcaaatagagctattggttcttatggagctagtattattcaacaacaaacagagaaacaaaagctttctgttttgactcattgcaacactggaagtctagccacagctggatatggtactgctctgggtgtcatccgtgcacttcatagtgccggagttctaaaaagggcttattgcacagaaacacgcccatttaatcaaggatctagacttactgcctttgagttggtgcatgaaaaaataccaggaactcttattgccgattctgctgacggttattggccggacatgtggatgctgttgttgttggggcagatcgggttgcatcaaatggtgacacagccaacaaaattggaacctacagcgttgccttgtccgctaagtttcataatgtacctttttatgtggctgcacccctaa

SEQ ID NO: 181 - DNA, 1119 bp, Helianthus tuberosus
atgggatctcaagaggactcatctctgcaatcaatccgttatcaccgtggctcacttcacttacttgatcagagaaaacttcctcttgataccatctatttggaaattcgagatgccgttgagggctgggaagcgataagagagatggtggttcgtggggcacctgctatcgccatagctgcagcgctttcactggctgttgaagtatcgaaactggacgggtttagtggaacaccaaaggatgcagcatcttttcttgaaaagaaattggaatatcttgtctcaagtcgtccgacagctgtgaatctttccgatgctgcaactaagcttacggagattgtaattaaccatgctgcgaccgccacagacgcgaatcaagttttcgaagcttacattgacgcggctgaaataatgttaaaggatgatgttgctgacaataaagctatagggtcgtatggatcatctgtcattcagactcaaaaaaaggattgcaagaaaatatcggttttaacgcattgcaatactggcagtctcgcgacagctggatacggaaccgctcttggagtaatccgtgcgcttcatgccgatggagtactagagcgagcttattgcacagaaacccgtccttttaaccaaggatcaagattgacagcttatgagttggtgcatgagaaaataccagccactcttatagcggattctgcggctgctgcgttaatgaaaaccgggcgcgtacatgctgtcatcgttggagctgatcgtgttgctgcaaatggtgacactgcgaacaagattggaacgtatagccttgcgttatccgccaaacatcacggtgttctgttttatgttgcagcaccattgacttcggttgatttgtcattgtcttccggagatgagattgttatcgaagaaagatcagctaaagaattactaaatacccacggaggtcttggggaacaaattgcagcgtccggaatttctgtttggaatccggcttttgatgttacaccggctaatcttataagtggaatcataaccgagaagggtgtcattacaaagaccgggaatgaggagtttgatatcaagggttttgtacacaagactatgagcaacaactga

SEQ ID NO: 182 - DNA, 627 bp, Ipomoea nil
atggcgaacggagctcattctgaagataaaactctacaagccatctgctacaaacgcggctctcttcagctccttgatcagaggaagcttccattacagacgatttatttggatataaaaaatgcaaaagacggatgggatgcaataaaagaaatggtagtccgcggggcacctgcaattgcgatagctgctgcactctctttggctgtagaagcgtctaacttagagacctttaatgggacagctcaagatgcggtatctttccttagccagaaattagaatatcttgtctcaagccggcctacagctgtcaatctttcagatgctgctacaaagcttaacgaagttattacgaaggaagcttccactgcttcagaagccaagactatttttgaggcttatattatggcagctgaaattatgctcgaggatgatgttgcttccaataaagcaattgggtcgcacggagcttctcttctccaaaatcagctggtgggctccaagaagatatcgatattaacccattgcaacactggcagcctggcaacggctgggtatggaactgctcttggtgtgattcgggctgtcaatactgcagggtttttggaaaagggcttattgcactga

SEQ ID NO: 183 - DNA, 873 bp, Lactuca virosa
atggcatctcaagccgactcatctctgcaagccatccgttatcaccgtggctcacttcagctacttgatcagagaaaacttcctcttgatacgatctatttggagattcgagatgctgctgaaggctgggaagcaatcagagagatggtggttcgtggtgcacctgcaatcgccatagctgcagcactttcactcgctgtagaagcatctaaaccggaaggatttagtggtacaccaaatgacgcagcatcgtttctcaaaacgaaattggaatacctagtctcaagtcgtccaacagctgtgaatctttcagatgctgcaactaaacttacagagattattacgaactctgctgcaactgctacagatgctaaccaagtgttcatttcttacattgaagctgctgaattaatgcttgaagacgatgttgcttccaataaagcaatcgggtcttatggatcttctttcattcaaaatcaacaaaaggaatctaagaaattgtctgttttgacacattgtaatactggcagtcttgcaacagctggatttggaactgctcttggagtaatccgtacactacattctgatggagtactagaaagagcttattgcacagaaacccgtccatttaaccaaggatcaagattgacagcttatgaattagttcatgacaaaatacccgcgactcttatagcagattcagcagctgctgctttaatgaaaactagacgtatccatgctgtcatttgtggagctgatcgtgttgctgctaatggtgacactgcgaacaagattggaacatacagcctagccttatctgctaaacatcatggtgttcaattttatgtagctgccccccttgacttcagttga

SEQ ID NO: 184 - DNA, 429 bp, Phyllostachys nigra
atggctacaaatcccagcaatggacttgaaggtgacaacactctccagtctatctgctaccaccgtggttcacttaagcttcttgatcaaagaaagcttcctctggagactacttacttagatatcaaagatgcttctgatggatggttggccatacgggagatggtagttcgaggggcgcctgccattgctatttcagcagcactttctcttgccgtcgaagtttctaatttggagaattttaatgggacacctgttgaagctgcttctttccttgcagggaaactggattatcttgtttcaagccgaccaactgcagtcaatctctcagatgctgcaacgaaacttaaagaagttgtatcaaatggctgctgctgctgctgcttccaactgtcagagtgttcttcaggcttacatagaggcagctga

SEQ ID NO: 185 - DNA, 1155 bp, Populus trichocarpa
atggctacaaatcccagcaatggacttgaaggtgacaacactctccagtctatctgctaccaccgtggttcacttaagcttcttgatcaaagaaagcttcctctggagactacttacttagatatcaaagatgcttctgatggatggctggccatacgggagatggtagttcgaggggcgcctgcaattgctatttcagcagcactttctcttgccgtcgaagtttctaatttggagaattttaatgggacacctgttgaagctgcttctttccttgcagggaaactggattatcttgtttcaagccgaccaactgcagtcaatctctcagatgctgcaacgaaacttaaagaagtcgtatcaaaggctgctgctgctgcttccaactgtcagagtgtttttcaggcttacatagaggcagctgaaattatgctagcagatgatgttgcttcaaacaaagcaattggctcatatggagcaaggtttattcagaaccaacagaaagatcctacaaaactgtctgttttgacccattgcaacactggcagtcttgcaacggctggatatggtactgccttgggtgtgattcgtgcacttcacggtgaaggagtgctccagagggcctattgcacagaaactcgtccgttcaatcagggatctagactcacagctttcgaattggtacatgagaaaatacctgccacccttatagcagactctgctgcagctgcattaatgaaagacagtaaagtgagtgctgttgttgttggagcagatcgtgtggctgcaaatggagacacagctaacaagattggaacctacagccttgccttatgtgcaatgcatcataacattccattttatgttgctgcaccacttacctcctttgattcatccctttcttctggaaaagagatcattatagaggaaagatctcctaaggaaatgttgaacgcacgtggaggacttggggaacaagttgctgcatccggaatttcagtatggaatccagcttttgatgttacccctgccagcttgataagtggtatcataacagaaaagggtgtcatcacaaagacgggcatggatgattttgacataaaggatttcataaataggctgtcggccagtgcattgcgtaagaggccaatgtag

SEQ ID NO: 186 - DNA, 1128 bp, Populus trichocarpa
atggctacaaatcccagcaatggacttgaaggtgacaacactctccagtctatctgctaccaccgtggttcacttaagcttcttgatcaaagaaagcttcctctggagactacttacttagatatcaaagatgcttctgatggatggctggccatacgggagatggtagttcgaggggcgcctgcaattgctatttcagcagcactttctcttgccgtcgaagtttctaatttggagaattttaatgggacacctgttgaagctgcttctttccttgcagggaaactggattatcttgtttcaagccgaccaactgcagtcaatctctcagatgctgcaacgaaacttaaagaagtcgtatcaaaggctgctgctgctgcttccaactgtcagagtgtttttcaggcttacatagaggcagctgaaattatgctagcagatgatgttgcttcaaacaaagcaattggctcatatggagcaaggtttattcagaaccaacagaaagatcctacaaaactgtctgttttgacccattgcaacactggcagtcttgcaacggctggatatggtactgccttgggtgtgattcgtgcacttcacggtgaaggagtgctccagagggcctattgcacagaaactcgtccgttcaatcagggatctagactcacagctttcgaattggtacatgagaaaatacctgccacccttatagcagactctgctgcagctgcattaatgaaagacagtaaagtgagtgctgttgttgttggagcagatcgtgtggctgcaaatggagacacagctaacaagattggaacctacagccttgccttatgtgcaatgcatcataacattccattttatgttgctgcaccacttacctcctttgattcatccctttcttctggaaaagagatcattatagaggaaagatctcctaaggaaatgttgaacgcacgtggaggacttggggaacaagttgctgcatccggaatttcagtatggaatccagcttttgatgttacccctgccagcttgataagtggtatcataacagaaaagggtgtcatcacaaagacgggcatggatgattttgacataaaggatttcataaataaggctggatga

SEQ ID NO: 187 - DNA, 417 bp, Vitis shuttleworthii
atggcggattccaactccaaacatcaggattctttgcagtcgatatgttataagcgcggctcactccaactgctcgatcagagaaagcttcctctggaaactgtctacctggaaattaaaggcgcagatgatggatggcatgcaataagagatatggtggttcgtggggcacccgcaattgcaatagcagcagccctttccctggctgtggaagtatccaacttagagggttttattgggacatctgatgatgcagcatctttccttaacagcaaattggactatcttgttactagccgacctactgctgtgaatctttcagatgctgcaacaaaacttaaaggagtaatatcaaatgctgctgccactgcttttgaagccatgaggtgtttttcaggcctttctagaggctgctga

SEQ ID NO: 188 - DNA, 1131 bp, Vitis vinifera
atggcggattccaactccaaacatcaggattctctgcagtcgatatgttataagcgcgggtcactccaactgctcgatcagagaaagcttcctctggaaactgtctacttggaaattaaaggcgcagatgatggatggcatgcaataagagatatggtggttcgtggggcacccgcaattgcaatagcagcagccctctccctggctgtggaagtatccaacttagaggattttattgggacatctgatgatgcagcatctttccttaacagcaaattggactatcttgttactagccgacctactgctgtgaatctttcagatgctgtaacaaaacttaaaggagtaatatcaaatgctgctgccactgcttttgaagccatgagtgtttttcaggcttttctagaggctgctgaagacatgcttagggaggatgttgctgcaaacagagcaattgggttgtatggagcaagttttcttcaaagccatataaaagactctaagaatctgtctattttgacacattgcaacactggaagtcttgcaacagctggatatggtactgctctcggtgtaatccgttccgttcatgctgaaggaattttactgagggcctattgcacagagacacgtccattcaaccaaggatccaggcttacagcttttgagttggtgcatgataatatacctgctactcttatagcagactctgctgcagctgcattaatgcaggctggacgcgtggatgctgtcattgttggagcagatcgcgtagctgcaaatggtgatactgctaacaagattgggacctattctctggccttaagtgcaaagcatcaccatattccattctttgtggctgcacccttgacttccattgatttaaccctttcttcgggacaagaaattgttatagaggaaagatccccaaaggaattgttgaactcgcgtggaggactcggggaacaggttgctgcatctggaatttgtgtttggaaccctgctttcgatgttaccccagctgatctgatagctggtatcataacagagaagggtgtaattactaagacaggtgatgttttcgacatcaaggatttcatacacaatgcaaccagtcactgctgtaaataa

SEQ ID NO: 189 - DNA, 1131 bp, Vitis vinifera
atggcggattccaactccaaacatcaggattctctgcagtcgatatgttataagcgcgggtcactccaactgctcgatcagagaaagcttcctctggaaactgtctacttggaaattaaaggcgcagatgatggatggcatgcaataagagatatggtggttcgtggggcacccgcaattgcaatagcagcagccctctccctggctgtggaagtatccaacttagaggattttattgggacatctgatgatgcagcatctttccttaacagcaaattggactatcttgttactagccgacctactgctgtgaatctttcagatgctgtaacaaaacttaaaggagtaatatcaaatgctgctgccactgcttttgaagccatgagtgtttttcaggcttttctagaggctgctgaagacatgcttagggaggatgttgctgcaaacagagcaattgggttgtatggagcaagttttcttcaaagccatataaaagactctaagaatctgtctattttgacacattgcaacactggaagtcttgcaacagctggatatggtactgctctcggtgtaatccgttccgttcatgctgaaggaattttactgagggcctattgcacagagacacgtccattcaaccaaggatccaggcttacagcttttgagttggtgcatgataatatacctgctactcttatagcagactctgctgcagctgcattaatgcaggctggacgcgtggatgctgtcattgttggagcagatcgcgtagctgcaaatggtgatactgctaacaagattgggacctattctctggccttaagtgcaaagcatcaccatattccattctttgtggctgcacccttgacttccattgatttaaccctttcttcgggacaagaaattgttatagaggaaagatccccaaaggaattgttgaactcgcgtggaggactcggggaacaggttgctgcatctggaatttgtgtttggaaccctgctttcgatgttaccccagctaatctgatagctggtatcataacagagaagggtgtaattactaagacaggtgatgttttcgacatcaaggatttcatacacaatgcaaccagtcactgctgtaaataa

SEQ ID NO: 190 - DNA, 1164 bp, Aquilegia formosa x pubescens
atgttgattcaatcaatggctttggaggaattgaagtcatctattgaacaagaatttgaattggtgaattctctccaagctatttgttataaacgtggttcacttaaactacttgatcagacaaagcttccactcgaaagtacttatttggatgttagaaattctgttgatggatggaatacaataagggatatggtggtccgtggggcacctgcaattgctatagctgcagccctttccttggctgtggaagcttttaacatgcagccgtataacggaacatctgaggaggctgcttcttttcttgtcaataagttagattatcttgtctcaagccgcccaactgctgtaaatctatcagatgctgccataaagctcaaagacatcatatcaaaggctgctgcttctggagatgccaaatcagtttttcaggcttacatagaagctgctgaaaccatgctcaaggatgatgttgcttcaaataaagcaattggttcctatggagcaagctttataaaagacacactgaaggatcttaaaagtgtatccattttaactcattgcaacactggcagtcttgcaacagctggatatggtactgccctgggggttattcgtgctcttcatactgatggaatgcttgaaagggctttttgcacagaaacaagaccattcaaccaggggtccaggcttacagcatttgagttggttcatgataagatacctgccactcttatagcagattcagcagcagctgctttgatgaaaactggacgtgttaatgctgtcatagttggagctgatcgtgtggctgcaaatggtgacactgctaacaagattggaacctacagcttagctctttgtgctttacatcatgggattccattttttgtcgctgcacctctaacttctgttgatctatctctttcctctgggagagagattgtgatcgaggaaagatctccaaaggaactcttgaatactcgtggaggacttggggagcaagtggctgcatctggaatctctgtttggaatccggcttttgatgttacaccatcaaaccttataacggctattgtaacagaaaagggtgtcattacaaagaatgggactgatgccttcgacataaatgattttgtacgaaaggcaactgggtgcaagtaa

SEQ ID NO: 191 - DNA, 1158 bp, Gossypium hirsutum
atggcgcttgattctaagttgattgacgacggacttgcggctgacaacactctccaagctatctgctataaacgtggctccctccagttgcttgaccagagaaaacttccattggaaacgatgtacttagatattcatggttcaacagatggatggaacgcaatccgagatatggtggttcgaggggctcctgctattgccatagctgcagccctttcactggcggttgaagttgccaacttaaaggactttaatggcggatcgaaggatgccgcttcttttcttgaatcgaaattagaatatcttgtctcaagtcgaccaacggctgtgaatctttcggatgctgctataaagcttaaagaaattatatcaaaggctgcttctactgttacagtgcctgagagtgttttccaggcttatatagaagctgctgaaatcatgcttgatgatgatgttgctactaacaaagcaatcgggtctcacggtgcaaattttctccagcaccaacagaataattcaaagagattttcagttttgacacactgcaacaccggaagtcttgccacagctggatatggtaccgcccttggtgttatccgcgcccttcatgctcaaggagtgttggaaagggcatattgtaccgaaacacgacccttcaatcagggatccagactcacggctttcgagctggtgcatgaaaaaatacctgctactctaatagcagattctgctgcagctgctttaatgaaagaagatcgtgttgatgctgttattgttggagcggatcgtgtgacagcgaatggtgatactgctaacaagattggaacctatagccttgccttatgtgcaatgcatcatcatattccattttacgttgccgcaccgcttacttccatagatttatcactttcttccggacaagaaattgtaatcgaggaaagatcagctaaggagttattgcacacacggggaggactgggagaacaagtggctgcttccgggatctcagtctggaacccggctttcgatgtcacccctgccaatctaatagccggtatcataacagaaaagggtgtaattacaaagaatgacataaaggatgatgcatttgacattaaggatttcatagagaaggcaacaggcaaatctaccgtatga

SEQ ID NO: 192 - DNA, 1158 bp, Gossypium raimondii
atggcgcttgattctaagttgattgacgacggacttgcggctgacaacactctccaagctatctgctataaacgtggctccctccagttgcttgaccagagaaaacttccattggaaacgatgtacttagatattcatggttcaacagatggatggaacgcaattcgagatatggtggttcgaggggctcctgctattgccatagctgcagccctttcactggcggttgaagttgccaacttaaaggactttaatggcggatcgaaggatgccgcttcttttcttgaatcgaaattagaatatcttgtctcaagtcgaccaacggctgtgaatctttcggatgctgctataaagcttaaagaaattatatcaaaggctgcttctactgttacagtgcctgagagtgttttccaggcttatatagaagctgctgaaatcatgcttgatgatgatgttgctactaacaaagcaatcgggtctcacggtgcaaattttctccagcaccaacagaataattcaaaaagattttcagttttgacacactgcaacaccggaagtcttgccacagctggatatggtaccgcccttggtgttatccgtgcccttcatgctcaaggagtgttggaaagggcatattgtaccgaaacacgacccttcaatcagggatccagactcacggctttcgagctggtgcatgaaaaaatacctgctactctaatagcagattctgctgcagctgctttaatgaaagaagatcgtgttgatgctgttattgttggagcggatcgtgtgacagcgaatggtgatactgctaacaagattggaacctatagccttgccttatgtgcaatgcatcatcatattccattttacgttgccgcaccgcttacttccatagatttatcactttcttccggacaagaaattgtaatcgaggaaagatcagctaaggagttattgcacacacggggaggactgggagaacaagtggctgcttccgggatctcagtctggaacccggctttcgatgtcacccctgccaatctaatagccggtatcataacagaaaagggtgtaattacaaagaatgacatgaaggatgatgcatttgatattaaggatttcatagagaaggcaacaggcaaatctaccgtatga

SEQ ID NO: 193 - DNA, 1125 bp, Nicotiana tabacum
atggctaatggaaatgaaggagacaagactctgctctccatttgttataatcgtggctcacttcagctactcgatcaaagaaaactccccctagagaccatttatttggatatccaggatacaaaagatggctgggatgcaattaaagaaatggttgtccgtggagcacctgcaattgctatagctgccgcactgtctttggcagtagaagtttcaaacctgtcttcgtttgatgggacttctgatgatgcatcagatttccttagtaataaattggattatcttgtttcaagtcggccaacagctgttaatctttcagatgctgcagttaagcttaaagaagttataaagaaggctgctaccacagccaaagatgcaaattcagtttttcaggcttacattgaagctgctgaagttatgctggaggatgatgttacttccaataaggcaattggatcatacggagctagttttctgaaggaacacctgaccgactctcagaagataacaattttgacccactgcaacaccggaagtctggctacagctggatatggaactgctcttggtgttatccgggcactttatactgatggagttctagaaagggcattctgcacagaaacccgtcccttcaatcagggatccagattgaccgcattcgagttggttcatgagaacataccagccacccttatagcagattcagctgcagctgcattgatgaatgctggtcgggtgaaagctgtcattgttggagctgatcgtgtagccgccaatggtgatactgccaataagatcggaacttacaaccttgctgtttctgctatgcatcatggtataccattttacgttgctgctcctttgacttctattgatctatctctttcttcgggacaagaaattgtgatagaagaaagatctccaaaggagctgttacatacacgaggaggactgggtgaacaagttgctgcctctggtatttcggtttggaaccctgcatttgatgtcactccagcaaatttgattagtggaattatcactgaaaagggtgtcatcacgaagaagggggcggaaacatttgatattgctgagtttgtgcgcaagacatctggaaatttgtga

SEQ ID NO: 194 - DNA, 1125 bp, Solanum tuberosum
atgtctgttggaagtgaaggagacaaaacactggaggcaatctgttataggcgcggctcacttcagttacttgatcaaagaaaacttcccttagagactctttatttggatatccacgatacaaacgatgcctgggatgcaatcaaggaaatggttgtccgtggggcacctgcaattgctatagctgctgcactgtctttggcagtagaaatttcaaacctagcttcctttgatgggacttctcatgatgcatcagttttcctaagtaaaaaattggattttcttgtttcaagtcgtccaacagctgttaatctttcagatgctgcagtaaagcttaaagaagttataagcaaggctgctgccacagccaaagaaatcaattcagtgtttcaggcttacattgaagctgctgaagttatgctggaggatgatgttacttccaataaggcaattggttcatatggagctagttttattaagaattacttgacagactctaagaatataacaattttgacccattgcaacactggaagtcttgccacagctggatatggaactgctcttggtgttatccgggcactttatgctgacggagctttagaaagggcatactgcacagaaacacgtccattcaatcagggatccagattgactgcatttgaattggttcatgaaaacatcccagccacccttatagctgattcagctgcagctgcattaatgaatgctggtcgtgtgaaagctgtcattgttggagctgatcgtgtagctgcaaatggtgatactgccaataagatcggaacttacaaccttgctgtttctgccatgcatcatggtataccattttacgttgcagctcctctgacttctgttgatctatccctttcttctggacaagaaattgtgatagaagaaagatctccaaaggaactgttacatacacgaggaggactaggtgaacaagttgctgcctctggtatttcggtttggaaccctgcatttgatgtcaccccagctaagttgattagtggaatcatcactgaaaagggtgtcatcacgaagaatgggacagacacctttgatattgctgggtttgtgcggaagacatcaggaaatttgtga

SEQ ID NO: 195 - protein, 836 aa, Chlorella
MALEAIRFSRGGGLAPASLQLLEQRKLPLETEWLDIDGPQSAWTAIRDMTVRGAPAIAIAAALSLAVDLINSGGGSQFQGPAAAAAYVAQQMDFLVTSRPTAVNLSIAAEALKRLAGEEAGRAGATAASVTAAVVAACQAMMAEDVAANKAMGRHGADALLAAAQERGRAGSGRLRVLTHCNTGSLATAAYGTALGVIRALHEQGRLEHAYCCETRPYNQGARLTAYELVHDGLPSTLICDSAAAALMASGRVDAVVVGADRIAANGDTANKIGTYCHAVAARHHGIPFFVAAPTTTLDPQLDTGSLIPIEERSPEEVTHFKGQRVAADIPVWNPSFDVTPAELIEGLITERGLVPRALAASGGFAVRSWLAAAAAANGVGGAAANGGVSGAAAPPARPLATQPGYQALDCGTVVEYVAARPQLAKHVGRPDTKNSWQVREVGDGNLNFVYVVEGPAGSLCVKQAPPFVRVVGESWPLTQDRVRIEAAALEAEAAHCPQHVPALYWFDPRMCIIAMQYLAPPHIIVRKGLIEGRLYPRLASHLASFLAATLFHTSLLALPSDEFRANIGRFTNVEMCRLTEQVVFTDPYYPSEHNRHTSPQLNADVAALRADVAARVAAAKLKAKFTQQHQALIHGDLHTGSIMATEDSTYVIDPEFAYYGPMAFDVGKILANLLLMFFACDGHATDAEPRMQQRRWLLDATKEVWEGFSRRFCELWHQHGARGDAYAAVLFGGGAEQGEEALAQAQRQFMQELWRDAVGFLGAVVIRRLVGIAHVADMDSIPDDDVRAVCERRALRFGRKALVEAAQVGGVEQLLQLAEAVRQDGQQPLFPLPST

SEQ ID NO: 196 - protein, 367 aa, Hordeum vulgare
MGESSALQSILYGRGALRLLDQRKLPLEEVYVDVKDSADGWNAIRDMVVRGAPAIAIAAALSLAVEVNDHNFIGTPAEAASFVSKKLEYLVSSRPTAVNLSDAATKLQNLVSTTAETAKDAKSIFQVFIEAAETMLVDDVADNKAIGLHGAEFLQRQLGSSKNISVLTHCNTGSLATAGYGTALGVIRALHSGGVLEKAFCTETRPFNQGSRLTAFELVHDKIPATLIADSAAAALMNNGQVQAVIVGADRIAANGDTANKIGTYNLSIAAKHHGVQFYVAAPVTSIDLSLPSGKQIVIEERSPKELLNSEGGLGKQVAASGISVWNPAFDVTPANLITAIITEKGVITKSDPDGTFDIKSFIECAK

SEQ ID NO: 197 - protein, 806 aa, Ostreococcus RCC809
MSALEAIVYERGALKLLDQLKLPLETTYVDVEDCDACWRAIKDMNVRGAPAIAIAAALALAVELEKKKGELATCEAAEAFVHERFDHMYTSRPTAVNLGEARTRIKSLATSLKANGDAGAMIEGVIEACEAMLAEDVASCRAIGAKGAEALLRAVNAKDGQKIKVMTCCNTGSLATAGYGTALGVIRALWETGCLERAYCLETRPYNQGSRLTAYELVYESIPGTLICDNMAAALMARGDVDAIVVGADRVAANGDFANKIGTYSLAVNAKHHGVPMFTAAPVTTLDPKTATGADIHIEERPGKEVTHSLGRRVAAEGIDVWNPSFDVTPAALLAGVITEHGVIEKNVSGVFPVAEFVANAKNGKIKAAKPSGPPGFIALDCETVLDYAASKDNVAAVLGGASTRSAWSAKEIGDGNINFVYIITGVSADKSVIVKQGLPFVRCVGESWPLTQERVRYEAEALIQAHKYCPAHVPEVYIYDPTMATIVMRYLEPPHIILRGGIIEGKLYPKLAEHVGEYLATTLYKSSALSVGGAALRRARQAFGQNEDMCELTEQVIFTEPYGKADNNHWTTPQLDDVVGQIQSDAALKRAVNVLKEKFMTEGQALLHGDLHTGSLMCTETTTFAIDNEFAFYGPMGFDVGLFFANLLLAYFSQRGWADRKGEYRSTQGDWLLDTFNSTWAVFEKRFLEQWNEQGVRDDCGGLSPAILFGAGVADGANALKAHQGAYMKQIWEDSLGFAGAEMIRRIIGIAHVADLDEIPDADIRALCERAALMCGRELMLNAKKLTPASIVDVVKSQEFAVFAI

SEQ ID NO: 198 - protein, 374 aa, Oryza sativa
MGELGALQSIVYHRGSLRLLDQRKLPLEVDYIDVKCSGDGWNAIRDMVVRGAPAIAIAAALALAVEVSGLEDFTGTPAEAAAFVSEKLEYLVSSRPTAVNLSDAATKLRSLVSRTAETEKDAKAIFQAYIDAAETMLVDDVSDNKAIGSHGAEFLKQKLEVSKDISVLTHCNTGSLATAGYGTALGVIRALHSGGILEKAFCTETRPFNQGSRLTAFELVHDKVPATLIADSAAAALMKSGCIQAVIVGADRIAANGDTANKIGTYNLAISAKHHGVQFYVAAPITSIDLSLPSGEQIVIEERSPNELLNSEGGLGKQVAASGISVWNPAFDVTPANLITAIITEKGVITKSDADETFNIKDFIQSAKLYSTMQ

SEQ ID NO: 199 - protein, 342 aa, Oryza sativa
MQALNTTSLTLRDNRLWILDQQALPQEKRWRACDSVEELVGHIHSLRVRGAPLIGLSASLLLALLAERGVPRAELEQALHTLRAARPTAVNLMNNLDRMKLALAEPDWVPAMANEALRLVEEDRRLCDRIADHGAGLIKPGSRLLTHCNTGGLATAGVGTAIGVLLRAHQQGKVQQVWVDETRPLLQGGRLTAWELGELGIPYRLICDSMAASLMAQGQVDAVWVGADRIAANGDVANKIGTYSLAVLAHYHGIPFYVAAPHTTHDPHCPDGAAIPIEQRAAAEVTGVSGSFGACQWAPADAPVCNPAFDVTPAKLISGWVFDSGVITPQQVEAGIFQRALG

SEQ ID NO: 200 - protein, 158 aa, Oryza sativa
MGELGALQSIVYHRGSLRLLDQRKLPLEVDYIDVKCSGDGWNAIRDMVVRGAPAIAIAAALALAVEVSGLEDFTGTPAEAAAFVSEKLEYLVSSRPTAVNLSDAATKLRSLVSRTAETEKDAKAIFQAYIDAAETMLVDDVSDNKAIGSHGAEFSNRN

SEQ ID NO: 201 - protein, 152 aa, Oryza sativa
MGELGALQSIVYHRGSLRLLDQRKLPLEVDYIDVKCSGDGWNAIRDMVVRGAPAIAIAAALALAVEVSGLEDFTGTPAEAAAFVSEKLEYLVSSRPTAVNLSDAANKLRSLVSRTAETEKDAKAIFQAYIDAAETMLVDDVSDNKGNWLSWS

SEQ ID NO: 202 - protein, 374 aa, Oryza sativa
MGELGALQSIVYHRGSLRLLDQRKLPLEVDYIDVKCSGDGWNAIRDMVVRGAPAIAIAAALALAVEVSGLEDFTGTPAEAAVFVSEKLEYLVSSRPTAVNLSDAATKLRSLVSRTAETEKDAKAIFQAYIDAAETMLVDDVSDNKAIGSHGAEFLKQKLEVSKDISVLTHCNTGSLATAGYGTALGVIRALHSGGILEKAFCTETRPFNQGSRLTAFELVHDKVPATLIADSAAAALMKSGCIQAVIVGADRIAANGDTANKIGTYNLAISAKHHGVQFYVAAPITSIDLSLPSGEQIVIEERSPNELLNSEGGLGKQVAASGISVWNPAFDVTPANLITAIITEKGVITKSDADETFNIKDFIQSAKLYSTMQ

SEQ ID NO: 203 - protein, 371 aa, Ostreococcus taurii
MATLEAIAYVRGSLRVLDQLRLPLETTYVDVPTCEACWRCIKDMRVRGAPAIAIAAALALATELERTRGRFRASAEVAAFARERFDYMYTSRPTAVNLGEARGRIQKVAMTLAETCDVTETIDGVIEACEAMLEEDVRSCREIGRRGAEALLASVGAKDGEKIKVMTCCNTGSLATAGYGTALGVIRALWERGRLERAYCLETRPYNQGSRLTAYELVYEKIPGTLICDNMAAALMARGDVDAIVVGADRVAANGDFANKIGTYSLAVNAKHHGVPMFTAAPVTTLDPETATGADIHIEERPADEVTHSLGKRVAAEGIDVWNPSFDVTPAALLSGIITESGVIEKNVKGFFPRLGASLRGGSWSNGTSKA

SEQ ID NO: 204 - protein, 384 aa, Pinus pinaster
MAAELKQNGEDSTLQSIRYSRGRLQLLDQRKLPHDSVYIDIQDSTAGWHAIHDMVVRGAPAIAISAALSLAVEVANLGPVDWSVNDAISFLQNRLEFLVSSRPTAVNLSDAATKLNEVVLKAANDMSKPEAIFQAYIEAAEVMLMADINDNKAIGSNGAKFILSQHQKRHNLHVLTHCNTGSLATAGYGTALGVIRALHSEGLLETAFCTETRPYNQGSRLTAYELIHEHIPAVLVADSAAAALQKSGRVDAIVVGADRIAENGDTANKIGTYNLAISAFHHGIPFYVAAPLTSVDLSLSSGEKIIIEERSPKELTHALGGQGQQVAPSGISVWNPAFDVTPANLITAIITEKGVITKKDSSSTFDIKGFVESFRVPITTETNI

SEQ ID NO: 205 - protein, 817 aa, Phaeodactylum tricornutum
MTDSSPSSLRSLIYDPSGPSLKVLDQLKVPAEKAYIDVTDIQTAWSVIRNMQIRGAPLIAIVASLGLAVDLVSPASTMDLDSMISMHGDRHGPVILSYIQGKIDYLETSRPTAVNLFNALSELRQALLHAHDETSTTKTSTDSPRERMVQAVMKHAEFMLERDMKDCQRIGQHGADEILRDAVNKVTILTICNTGALACSAYGTALGVVRAVRERGQLKSIIALETRPYNQGSRLTAFEIVEEDMPGGILICDSMAAALMKKGGVDAVVVGADRVCANGDTANKIGTYSLALVAAAHDVPVYVAAPFTTLDVSLTHGDQIVIEERPGDELISTSQAPSSIAVWNPAFDVTPARYLAGIITEKGVIRPTVDGVMDVASFVARHQDEGASIEGVPADMIKLKVPHDYSEQSTKTLPSFLIKNAPKVMDILGTTCVDDLECVEVGDGNLNLVFIVANHKSGIKMIVKQSLPYVRCVGHSWPLTLERSFFEYKALVAEKEACPNFVPSVYYFSKSNGIIAMEYLAPPCIILRKGLIQGIRYPTMAADMGTFCAQTFFKTSGFRLSPTQLRQQVQFWSRNVEMCALTEQVVFTEPYMQADNNHWTTPQLDEDKKAIENDNVLKVAAAMWKAKFLSKTQSLIHADLHTGSVMCAPEPGKTYVIDPEFAFYGPMGFDTGAFVANLVLAYVSQPGHANGDDYATWILEQIAVFWNTLVAQFVALWKDPLEHTGFLYGAETLESASYECQVAFFSDLLTDTLGFAGMKMLRRVVGIAHVEDLESIEDAEVRSQCERRAIEIAKKFIKSAESFRSIEEAIECARSQQ

SEQ ID NO: 206 - protein, 367 aa, Sorghum bicolor
MVGSDALQSIVYARGSLRLLDQRKLPLDMDYIDVKNSVDGWNAIRDMVVRGAPAIAIAAALALAVEVSDLDFIGTPGEAASFVSKKLEYLVSSRPTAVNLSDAATKLQTLVSKAAETAKDSKAIFQAYIEAAETMLVDDVADNKAIGSHGAEFLQRQLANSEKISVLTHCNTGSLATAGYGTALGVIRALHSGGVLEKAFCTETRPFNQGSRLTAFELVHEKIPATLIADSAAAALMKQGHVKAVIVGADRIAANGDTANKIGTYNLAISAKHHSVQFYVAAPVTSIDLSLPSGDEIVIEERSPKELLNSEGGLGKQVAASGISVWNPAFDVTPANLITAIITEKGVITKTDADGSFDIKGFLQPAK

SEQ ID NO: 207 - protein, 367 aa, Sorghum bicolor
MVGSDALQSIVYARGSLRLLDQRKLPLDMDYIDVKNSVDGWNAIRDMVVRGAPAIAIAAALALAVEVSDLDFIGTPGEAASFVSKKLEYLVSSRPTAVNLSDAATKLQTLVSKAAETAKDSKAIFQAYIEAAETMLVDDVADNKAIGSHGAEFLQRQLANSEKISVLTHCNTGSLATAGYGTALGVIRTLHSGGVLEKAFCTETRPFNQGSRLTAFELVHEKIPATLIADSAAAALMKQGHVKAVIVGADRIAANGDTANKIGTYNLAISAKHHSVQFYVAAPVTSIDLSLPSGDEIVIEERSPKELLNSEGGLGKQVAASGISVWNPAFDVTPANLITAIITEKGVITKTDADGSFDIKGFLQPAK

SEQ ID NO: 208 - protein, 170 aa, Saccharum officinarum
MVGSDALQSIVYNRGSLRLLDQRKLPLEMDYIDVKNSVDGWNAIRDMVVRGAPAIAIAAALALAVEVSDLDFIGTPGEAASFVSKKLEYLVSSRPTAVNLSDAATKLQTLVSKAAETAKDSKAIFQVYIEAAKTMLVDDVAKNKTYGLTWSWISSKAACKFKKDICSNPW

SEQ ID NO: 209 - protein, 367 aa, Triticum aestivum
MGESSALQSILYDRGALRLLDQRKLPLEEVYIDVKDSADGWNAIRDMVVRGAPAIAIAARLSLAVEVNDHDFTGTPVEAASFVSKKLEYLVSSRPTAVNLSDAATKLQNLVSRTAETAKDAKSIFQVFIEAAEAMLVDDVADNKAIGSHGAEFLQRQLGSSRNISVLTHCNTGSLATAGYGTALGVIRALHSGGVLEKAFCTETRPFNQGSRLTAFELVHDKIPATLIADSAAAALMNNGQVQAVIVGADRIAANGDTANKIGTYNLSISAKHHGMQFYVAAPVTSIDLSLPSGKQIVIEERSPKELLNSEGGLGKQVAASGISVWNPAFDVTPANLITAIITEKGVITKSDPNGSFDIKGFIERAK

SEQ ID NO: 210 - protein, 150 aa, Triticum aestivum
MGESSALQSILYDRGALRLLDQRKLPLEEVYIDVKDSADGWNAIRDMVVRGAPAIAIAVALSLAVEVNDHDFTGTPVEAALFVSKKLEYLVSSRPTAVNLSDAATKLQNLVSRTAETAKDAKSIFQQGSLGHHFCTSVSDYCRLVSIGPY

SEQ ID NO: 211 - protein, 367 aa, Triticum aestivum
MGESSALQSILYDRGALRLLDQRKLPLEEVYIDVKDSADGWNAIRDMVVRGAPAIAIAAALSLAVEVNDHDFTGTPVEAASFVSKKLEYLVSSRPTAVNLSDAATKLQNLVSRTAETAKDAKSIFQVFIEAAEAMLVDDVADNKAIGSHGAEFLQRQLGSSRNISVLTHCNTGSLATAGYGTALGVIRALHSGGVLEKAFCTETRPFNQGSRLTAFELVHDKIPATLIADSAAAALMNNGQVQAVIVGADRIAANGDTANKIGTYNLSISAKHHGMQFYVAAPVTSIDLSLPSGKQIVIEERSPKELLNSEGGLGKQVAASGISVWNPAFDVTPANLITAIITEKGVITKSDPNGSFDIKGFIECAK

SEQ ID NO: 212 - protein, 373 aa, Thalassiosira pseudonana
MTDPANTLRSLIFDVDSATNKATLSVLDQLRLPDETMYTKIVNVQDAWDAIRSMRIRGAPLIAVVAVLGLAVDLSSNELTIGELDLISGIDEVKAFVTTKMEYLKTSRPTAVNLFNAMDELKSFIDDDAIKTREEVVSAIVQHAYLMLERDVSDNKAIGSHGADDLLSRHVHPEGVCVVTICNTGSLATAGWGTALGVARELQRRGKLRSIAALETRPYNQGSRLTAYEIMQEQMPNPILLCDSMAASYLKSKGADVCVVGADRVCANGDTANKIGTFQLSIIAKEMGVEFFVASPFTTLDVELESGDMIEIEERPDGEMLESSGAPKGMKCWNPAFDVTPAKYISGIITEKGVLKPSADGTFDVKGFVSMHS

SEQ ID NO: 213 - protein, 401 aa, Volvox carteri
MAPEGSPSSLQAIRYTRGSLQLLDQRLLPFQTAYLDVPDVKAAWTQIRDMVVRGAPAIGCTGALAMAVELQTHKGAGTEFSSVKEATDYINSTLDYLVTSRPTAVNLADAANKLKAAAALAAAADAATPSSVCSAVMDAAEAYFVEDIASNKAMGATGAAALLAAAHARGRGVGGKLRVLTHCNTGSLATAGYGTALGVIRALHEQGTLEHAFCTETRPYNQGARLTAFELAHDQLPATLICDSAAAALMASGQVDAVVVGADRVVANGDTANKIGTKSLSISAAHFNIPFFIAAPTTTLDPHLPSGDHIVIEQRTHEEVTHFRGIRVAAEGVNVWNPSFDVAPCGLIEGIITERGMIPKTKDGVFQVSSRERGKGGGREDGLLNSLWDENTEREYGTRVG

SEQ ID NO: 214 - protein, 283 aa, Zea mays
MVGSDALQSIVYSRGSLRLLDQRKLPLEMEYIDVKSSADGWNAIRDMVVRGAPAIAIAAALALAVEVSDLDFIGTPEEAASFVSKKLEYLVSSRPTAVNLSDAATKLQTLVSKAAETAKDSKSIFQVYIEAAETMLVDDVADNKAIGSHGAVFLQRQLANSKKISVLTHCNTGSLATAGYGTALGVIRALHSGGVLEKAFCTETRPFNQGSRLTAFELVHEKIPATLIADSAAAALMKQGHVQAVIVGADRIAANGDTANKIGTYNLAISAKIIASSSMWQRR

SEQ ID NO: 215 - protein, 259 aa, Zea mays
MVGSDALQSIVYSRGSLRLLDQRKLPLEMEYIDVKSSADGWNAIRDMVVRGAPAIAIAAALALAVEVSDLDFIGTPEEAASFVSKKLEYLVSSRPTAVNLSDAATKLQTLVSKAAETAKDSKSIFQVYIEAAETMLVDDVADNKAIGSHGAVFLQRQLANSKKISVLTHCNTGSLATAGYGTALGVILALHSGGVLEKAFCTETRPFNQGSRLTAFELVHEKIPATLIADSAAAALMKQGAYTCLFRGRFSSGGYIVVS

SEQ ID NO: 216 - protein, 367 aa, Zea mays
MAASDALQSIVYSRGSLRLLDQRKLPLEMEYIDVKSSADGWNAIRDMVVRGAPAIAIAAALALAVEVSDLDFIGTPEEAASFVSKKLEYLVSSRPTAVNLSDAATKLQTLVSKAAETAKDSKSIFQVYIEAAETMLVDDVADNKAIGSHGAVFLQRQLANSKKISVLTHCNTGSLATAGYGTALGVIRALHSGGVLEKAFCTETRPFNQGSRLTAFELVHEKIPATLIADSAAAALMKQGHVQAVIVGADRIAANGDTANKIGTYNLAISAKHHSVQFYVSAPVTSIDLSLPSGDEIVIEERSPKELLNSEGGLGKQVAASGISVWNPAFDVTPANLITAIITEKGVITKTDADGSFDIKGFLLPAK

SEQ ID NO: 217 - protein, 374 aa, Arabidopsis thaliana
MSGEGDTTLKAICYKPGSLQLLDQRKLPLETIYLEIRDASDGWSAIQEMVVRGAPAIAIAAALSLAVEVFNFHGFDGSASDAVAFLENKLDYLVSSRPTAVNLADAALKLKHVIAKALATATEAKSIFKAYIEASEDMLEDDVVSNKAIGNFGLSLLRQQAKNPDKLSVLTHCNTGSLATAGYGTALGVIRALHTQGILERAYCTETRPFNQGSRLTAFELVHEKIPATLIADSAAAALMKDGRVDGVIVGADRVASNGDTANKIGTYSLALCAKHHGIPFYVAAPLTSVDLSLSSGKEIVIEERSPKELMHTHGGLGERIAAPGISVWNPAFDMTPAELIAGIITEKGVITKNGNDTFDISSFAKKITGNSSR

SEQ ID NO: 218 - protein, 233 aa, Brassica napus
MSGEGDTTLKSICYKPGSLQLLDQRKLPLETTYLEIRDTADGWSAIQEMVVRGAPAIAIAAALSLAVEVSNFSGFDGSSAEAVAFLEKKLDYLVSSRPTAVNLADASLKLKQVIANALASSAAEPNSIFKAYIEAAENMLEDDVASNKAIGTFGSSLLRQQAKNPDKLSVLTHCNTGSLATAGYGTALGVIRALHTQGVLERAYCTETRPFNQGSRLTAFELVHEKDPCNAHC

SEQ ID NO: 219 - protein, 348 aa, Citrus clementina
MALDSVSTDNNSLQSICYRRGSLQLLDQRKLPLETIYLEIRDSADGWSAIREMVVRGAPAIAMAAALSLAVEVFNLNAFSGTAADAASFLGNKLEYLVSSRPTAVNLSDAAAKLKEIISKAAATASEANSVFQAYIEAAEIMLKDDVATNKAIGSYGASFLQNQLKNSKFSVLTHCNTGSLATAGYGTALGVIRALHSEGVLERAYCSETRPFNQGSRLTAFELVHDRIPATLIADSAAAALMKDGRVSAVIVGADRVAANGDTTNKIGTYSLALCAKVHNILFYVAAPLTSIDLTLSSGKKMSKKERSAKEMLCSQGRLGGKSNCIRKPWRGTGLLSFPPLKLIHGK

SEQ ID NO: 220 - protein, 233 aa, Citrus clementina
MALDSVSTDNNSLQSICYRRGSLQLLDQRKLPLETIYLEIRDSADGWSAIREMVVRGAPAIAMAAALSLAVEVFNLNAFSGTAADAASFLGNKLEYLVSSRPTAVNLSDAAAKLKEIISKAAATASEANSVFQAYIEAAEIMLKDDVATNKAIGSYGASFLQNQLKNSKFSVLTHCNTGSLGTAGYGTGLGVIRALHSEGSVERAYCSETRPSTKDLDSLLLSGYMIAYQLLL

SEQ ID NO: 221 - protein, 225 aa, Citrus clementina
MALDSVSTDNNSLQSICYRRGSLQLLDQRKLPLETIYLEIRDSADGWSAIREMVVRGAPAIAMAAALSLAVEVFNLNAFSGTAADAASFLGNKLEYLVSSRPTAVNLSDAAAKLKEIISKAAATASEANSVFQAYIEAAEIMLKDDVATNKAIGSYGASFLQNQLKKSKFSVLTHCNTGSLATAGYGTALGVIRAPHSEGMVKRAYCSETRPFNQDLDSLVFNCT

SEQ ID NO: 222 - protein, 293 aa, Citrus clementina
MALDSVSTDNNSLQSICYRRGSLQLLDQRKLPLETIYLEIRDSADGWSAIREMVVRGAPAIAMAAALSLAVEVFNLNAFSGTAADAASFLGNKLEYLVSSRPTAVNLSDAAAKLKEIISKAAATASEANSVFQAYIEAAEIMLKDDVATNKAIGSYGASFLQNQLKNSKFSVLTHCNTGSLATAGYGTALGVIRALHSEGVLERAYCSETRPFNQGSRLTAFELVHDRIPATLIADSAAAALMKDGRVSAVIVGADRVAANGDTTNKIGTYRLALCAKFHNILFYVGCSPDVN

SEQ ID NO: 223 - protein, 343 aa, Citrus clementina
MALDSVSTDNNSLQSICYRRGSLQLLDQRKLPLETIYLEIRDSADGWSAIREMVVRGAPAIAMAAALSLAVEVFNLNAFSGTAADAASFLGNKLEYLVSSRPTAVNLSDAAAKLKEIISKAAATASEANSVFQAYIEAAEIMLKDDVATNKAIGSYGASFLQNQLKNSKFSVLTHCNTGSLATAGYGTALGVIRALHSEGVLERAYCSETRPFNQGSRLTAFELVHDRIPATLIADSAAAALMKDGRVSAVIVGADRVAANGDTTNKIGTYSLALCAKFHNILFYVAAPLTSIDLTLSSGQEIVIEERSAKRIVVLSRENWVNQVAASGISVWNPAFDVPQLN

SEQ ID NO: 224 - protein, 371 aa, Carthamus tinctorius
MGSQDDSSLQSIRYVRGSLQLLDQRKLPLDTIYLEIRNAAEGWEAIREMVVRGAPAIAIAAALSLAVGVSKLEGFNGTPYEAASFLEKRLEYLVSSRPTAVNLSDAATKLTEIVKNSAATATDDNQVFQAYIVAAEMMLEDDVASNKAIGSYGSSFIQNQKKDFKKLSVLTHCNTGSLATAGYGTALGVIRSLYADGVLESAYCTETRPFNQGSRLTAFELVHDKIPATLIADSAAAALTKAGRVHAVIVGADRVAANGDTANKIGTYSLALCAKHHGVLFYVAAPLTSVDLSLSSGDEIVIEERSAKELLNTRGGLGEQVAASGIAVWNPAFDVTPACLINGIITEKGVITKIENEVFDIKGFVQTTLSN

SEQ ID NO: 225 - protein, 286 aa, Glycine max
MAFESNEVAATTLQAICYKRGSLQLLDQRKLPLETVYLEIRDSTDGWNAIREMVVRGAPAIAIAAALSLAVEVFNLDFNGSATDAVSLLQKKLEYLVTSRPTAVNLSDAATKLKEVISNAAATTSEGRSVFQVYIDAAEVMLEDDVASNRAIGSYGASIIQQQTEKQKLSVLTHCNTGSLATAGYGTALGVIRALHSAGVLKRAYCTETRPFNQGSRLTAFELVHEKIPGTLIADSADGYWPDMWMLLLLGQIGLHQMVTQPTKLEPTALPCPLSFIMYLFMWLHP

SEQ ID NO: 226 - protein, 372 aa, Helianthus tuberosus
MGSQEDSSLQSIRYHRGSLHLLDQRKLPLDTIYLEIRDAVEGWEAIREMVVRGAPAIAIAAALSLAVEVSKLDGFSGTPKDAASFLEKKLEYLVSSRPTAVNLSDAATKLTEIVINHAATATDANQVFEAYIDAAEIMLKDDVADNKAIGSYGSSVIQTQKKDCKKISVLTHCNTGSLATAGYGTALGVIRALHADGVLERAYCTETRPFNQGSRLTAYELVHEKIPATLIADSAAAALMKTGRVHAVIVGADRVAANGDTANKIGTYSLALSAKHHGVLFYVAAPLTSVDLSLSSGDEIVIEERSAKELLNTHGGLGEQIAASGISVWNPAFDVTPANLISGIITEKGVITKTGNEEFDIKGFVHKTMSNN

SEQ ID NO: 227 - protein, 208 aa, Ipomoea nil
MANGAHSEDKTLQAICYKRGSLQLLDQRKLPLQTIYLDIKNAKDGWDAIKEMVVRGAPAIAIAAALSLAVEASNLETFNGTAQDAVSFLSQKLEYLVSSRPTAVNLSDAATKLNEVITKEASTASEAKTIFEAYIMAAEIMLEDDVASNKAIGSHGASLLQNQLVGSKKISILTHCNTGSLATAGYGTALGVIRAVNTAGFLEKGLLH

SEQ ID NO: 228 - protein, 290 aa, Lactuca virosa
MASQADSSLQAIRYHRGSLQLLDQRKLPLDTIYLEIRDAAEGWEAIREMVVRGAPAIAIAAALSLAVEASKPEGFSGTPNDAASFLKTKLEYLVSSRPTAVNLSDAATKLTEIITNSAATATDANQVFISYIEAAELMLEDDVASNKAIGSYGSSFIQNQQKESKKLSVLTHCNTGSLATAGFGTALGVIRTLHSDGVLERAYCTETRPFNQGSRLTAYELVHDKIPATLIADSAAAALMKTRRIHAVICGADRVAANGDTANKIGTYSLALSAKHHGVQFYVAAPLDFS

SEQ ID NO: 229 - protein, 142 aa, Phyloostachys nigra
MATNPSNGLEGDNTLQSICYHRGSLKLLDQRKLPLETTYLDIKDASDGWLAIREMVVRGAPAIAISAALSLAVEVSNLENFNGTPVEAASFLAGKLDYLVSSRPTAVNLSDAATKLKEVVSNGCCCCCFQLSECSSGLHRGS

SEQ ID NO: 230 - protein, 384 aa, Populus trichocarpa
MATNPSNGLEGDNTLQSICYHRGSLKLLDQRKLPLETTYLDIKDASDGWLAIREMVVRGAPAIAISAALSLAVEVSNLENFNGTPVEAASFLAGKLDYLVSSRPTAVNLSDAATKLKEVVSKAAAAASNCQSVFQAYIEAAEIMLADDVASNKAIGSYGARFIQNQQKDPTKLSVLTHCNTGSLATAGYGTALGVIRALHGEGVLQRAYCTETRPFNQGSRLTAFELVHEKIPATLIADSAAAALMKDSKVSAVVVGADRVAANGDTANKIGTYSLALCAMHHNIPFYVAAPLTSFDSSLSSGKEIIIEERSPKEMLNARGGLGEQVAASGISVWNPAFDVTPASLISGIITEKGVITKTGMDDFDIKDFINRLSASALRKRPM

SEQ ID NO: 231 - protein, 375 aa, Populus trichocarpa
MATNPSNGLEGDNTLQSICYHRGSLKLLDQRKLPLETTYLDIKDASDGWLAIREMVVRGAPAIAISAALSLAVEVSNLENFNGTPVEAASFLAGKLDYLVSSRPTAVNLSDAATKLKEVVSKAAAAASNCQSVFQAYIEAAEIMLADDVASNKAIGSYGARFIQNQQKDPTKLSVLTHCNTGSLATAGYGTALGVIRALHGEGVLQRAYCTETRPFNQGSRLTAFELVHEKIPATLIADSAAAALMKDSKVSAVVVGADRVAANGDTANKIGTYSLALCAMHHNIPFYVAAPLTSFDSSLSSGKEIIIEERSPKEMLNARGGLGEQVAASGISVWNPAFDVTPASLISGIITEKGVITKTGMDDFDIKDFINKAG

SEQ ID NO: 232 - protein, 138 aa, Vitis shuttleworthii
MADSNSKHQDSLQSICYKRGSLQLLDQRKLPLETVYLEIKGADDGWHAIRDMVVRGAPAIAIAAALSLAVEVSNLEGFIGTSDDAASFLNSKLDYLVTSRPTAVNLSDAATKLKGVISNAAATAFEAMRCFSGLSRGC

SEQ ID NO: 233 - protein, 376 aa, Vitis vinifera
MADSNSKHQDSLQSICYKRGSLQLLDQRKLPLETVYLEIKGADDGWHAIRDMVVRGAPAIAIAAALSLAVEVSNLEDFIGTSDDAASFLNSKLDYLVTSRPTAVNLSDAVTKLKGVISNAAATAFEAMSVFQAFLEAAEDMLREDVAANRAIGLYGASFLQSHIKDSKNLSILTHCNTGSLATAGYGTALGVIRSVHAEGILLRAYCTETRPFNQGSRLTAFELVHDNIPATLIADSAAAALMQAGRVDAVIVGADRVAANGDTANKIGTYSLALSAKHHHIPFFVAAPLTSIDLTLSSGQEIVIEERSPKELLNSRGGLGEQVAASGICVWNPAFDVTPADLIAGIITEKGVITKTGDVFDIKDFIHNATSHCCK

SEQ ID NO: 234 - protein, 376 aa, Vitis vinifera
MADSNSKHQDSLQSICYKRGSLQLLDQRKLPLETVYLEIKGADDGWHAIRDMVVRGAPAIAIAAALSLAVEVSNLEDFIGTSDDAASFLNSKLDYLVTSRPTAVNLSDAVTKLKGVISNAAATAFEAMSVFQAFLEAAEDMLREDVAANRAIGLYGASFLQSHIKDSKNLSILTHCNTGSLATAGYGTALGVIRSVHAEGILLRAYCTETRPFNQGSRLTAFELVHDNIPATLIADSAAAALMQAGRVDAVIVGADRVAANGDTANKIGTYSLALSAKHHHIPFFVAAPLTSIDLTLSSGQEIVIEERSPKELLNSRGGLGEQVAASGICVWNPAFDVTPANLIAGIITEKGVITKTGDVFDIKDFIHNATSHCCK

SEQ ID NO: 235 - protein, 387 aa, Aquilegia formosa x pubescens
MLIQSMALEELKSSIEQEFELVNSLQAICYKRGSLKLLDQTKLPLESTYLDVRNSVDGWNTIRDMVVRGAPAIAIAAALSLAVEAFNMQPYNGTSEEAASFLVNKLDYLVSSRPTAVNLSDAAIKLKDIISKAAASGDAKSVFQAYIEAAETMLKDDVASNKAIGSYGASFIKDTLKDLKSVSILTHCNTGSLATAGYGTALGVIRALHTDGMLERAFCTETRPFNQGSRLTAFELVHDKIPATLIADSAAAALMKTGRVNAVIVGADRVAANGDTANKIGTYSLALCALHHGIPFFVAAPLTSVDLSLSSGREIVIEERSPKELLNTRGGLGEQVAASGISVWNPAFDVTPSNLITAIVTEKGVITKNGTDAFDINDFVRKATGCK

SEQ ID NO: 236 - protein, 385 aa, Gossypium hirsutum
MALDSKLIDDGLAADNTLQAICYKRGSLQLLDQRKLPLETMYLDIHGSTDGWNAIRDMVVRGAPAIAIAAALSLAVEVANLKDFNGGSKDAASFLESKLEYLVSSRPTAVNLSDAAIKLKEIISKAASTVTVPESVFQAYIEAAEIMLDDDVATNKAIGSHGANFLQHQQNNSKRFSVLTHCNTGSLATAGYGTALGVIRALHAQGVLERAYCTETRPFNQGSRLTAFELVHEKIPATLIADSAAAALMKEDRVDAVIVGADRVTANGDTANKIGTYSLALCAMHHHIPFYVAAPLTSIDLSLSSGQEIVIEERSAKELLHTRGGLGEQVAASGISVWNPAFDVTPANLIAGIITEKGVITKNDIKDDAFDIKDFIEKATGKSTV

SEQ ID NO: 237 - protein, 385 aa, Gossypium raimondii
MALDSKLIDDGLAADNTLQAICYKRGSLQLLDQRKLPLETMYLDIHGSTDGWNAIRDMVVRGAPAIAIAAALSLAVEVANLKDFNGGSKDAASFLESKLEYLVSSRPTAVNLSDAAIKLKEIISKAASTVTVPESVFQAYIEAAEIMLDDDVATNKAIGSHGANFLQHQQNNSKRFSVLTHCNTGSLATAGYGTALGVIRALHAQGVLERAYCTETRPFNQGSRLTAFELVHEKIPATLIADSAAAALMKEDRVDAVIVGADRVTANGDTANKIGTYSLALCAMHHHIPFYVAAPLTSIDLSLSSGQEIVIEERSAKELLHTRGGLGEQVAASGISVWNPAFDVTPANLIAGIITEKGVITKNDMKDDAFDIKDFIEKATGKSTV

SEQ ID NO: 238 - protein, 374 aa, Nicotiana tabacum
MANGNEGDKTLLSICYNRGSLQLLDQRKLPLETIYLDIQDTKDGWDAIKEMVVRGAPAIAIAAALSLAVEVSNLSSFDGTSDDASDFLSNKLDYLVSSRPTAVNLSDAAVKLKEVIKKAATTAKDANSVFQAYIEAAEVMLEDDVTSNKAIGSYGASFLKEHLTDSQKITILTHCNTGSLATAGYGTALGVIRALYTDGVLERAFCTETRPFNQGSRLTAFELVHENIPATLIADSAAAALMNAGRVKAVIVGADRVAANGDTANKIGTYNLAVSAMHHGIPFYVAAPLTSIDLSLSSGQEIVIEERSPKELLHTRGGLGEQVAASGISVWNPAFDVTPANLISGIITEKGVITKKGAETFDIAEFVRKTSGNL

SEQ ID NO: 239 - protein, 374 aa, Solanum tuberosum
MSVGSEGDKTLEAICYRRGSLQLLDQRKLPLETLYLDIHDTNDAWDAIKEMVVRGAPAIAIAAALSLAVEISNLASFDGTSHDASVFLSKKLDFLVSSRPTAVNLSDAAVKLKEVISKAAATAKEINSVFQAYIEAAEVMLEDDVTSNKAIGSYGASFIKNYLTDSKNITILTHCNTGSLATAGYGTALGVIRALYADGALERAYCTETRPFNQGSRLTAFELVHENIPATLIADSAAAALMNAGRVKAVIVGADRVAANGDTANKIGTYNLAVSAMHHGIPFYVAAPLTSVDLSLSSGQEIVIEERSPKELLHTRGGLGEQVAASGISVWNPAFDVTPAKLISGIITEKGVITKNGTDTFDIAGFVRKTSGNL

SEQ ID NO: 240 - DNA, 2544 bp, Oryza sativa
actgttcgttgcacaattgatgagcaatgcttttttataatgccaactttgtacaaaaaagcaggcttaaacaatggagaaggatcaccagcccgtcatcagcttgcgccccggcggcggcggcggcggcccccgccccggccgcctcttctcccccgccttcgccgccgccgcctccggctccggcgacttgctccgctcccacgtcggcggcgcatccaagattggtgatccaaattttgaggtgcgcgagcgtgttcgctatacaagagatcaacttctcgaactgcgtgagatcgttgacatacctgaggccatcttaagaattaatcaagagattgatatagagcttcatggtgaagatcagatttggggtcgccctgagtcagatgtgcaagtgcagacacaaacccaggcgcaaccgcacaatcggtatggtgagacagataaccgtgactggcgtgcacgcacggttcaacctccggcagctaatgaagagaagtcctgggacaacattcgtgaagctaaagcagcacatgcttcaagtggtcggcaacaagagcaagttaacaggcaggatcaattaaaccaccagtttgcttcaaaagctcaggttggcccgactcctgctcttatcaaggctgaggtaccttggtcagctagaagaggcaatctctcagagaaagatagagtcctgaaaacagtgaaaggtatactaaacaaactgacaccggagaaatttgatctactcaagggccaactaatggaatctggaattaccactgctgatattctaaaggatgttatttctctcatatttgagaaggctgtttttgagcccaccttctgtccgatgtatgctcaactttgttccgatctcaatgagaagctaccatcattcccttcggaagaaccaggtggcaaagagattacattcaagcgtgtgctgttgaacaattgtcaggaagcatttgaaggtgctgagagcctaagggctgaaatagcaaaattgactggccctgaccaagagatggagagaagggacaaagaaaggattgtcaaactaagaacacttggaaatatccgtctaattggtgagctacttaagcaaaagatggtacctgaaaagatagttcatcacattgttcaggaactcttggggtctggacctgataaaaaggcttgccctgaagaggaaaacgttgaggctatttgtcagttcttcaatacaattggtaaacagcttgacgagaacccaaaatctcgtcgaattaatgatacctacttcattcagatgaaggagttaacaacaaaccttcagttggcaccacgtctgaggtttatggttcgtgatgtggttgatcttcgttcaaacaattgggtgcctcgacgtgaagagattaaggccaagacaatcagtgaaattcatgatgaggctatgaagacacttggactacggccaggggcaacaggactcacgaggaatggccgtaatgcaccaggtggtcctctttcccctggtggattcccaatgaatcgaccaggaacaggagggatgatgcctgggatgcctggaacacctggtatgcctggatcaagaaagatgcctggaatgcctgggttagataatgataactgggaagttccacgttctaaatcaatgccaagaggcgactctcttcgtaaccagggtccgttgcttaataagccatcatctattaacaagccatcatctattaactccaggcttcttcctcatggaagtggagcactaattggtaagagtgctcttttgggcagtggtggtccaccatctcgcccttccagccttatggctagtctcactcatacaccagctcaaactgcaccatcaccaaaacctgtaagtgcagctccagctgttgtgcctgtcacagacaaagcagccggttcttcccatgagatgccagctgcagttcagaagaagacggtatcccttcttgaagagtattttggcatacgtattctggatgaagcacaacaatgtatcgaggagcttcagtgtcctgagtactactctgagattgtgaaagaagctatcaatcttgctttggataagggtcccaacttcattgatcctcttgttaggctgctggagcatctgcacgccaagaaaattttcaagactgaggacctgaaaactggatgcttactgtatgcagccctgctggaagatattggtattgaccttcctctagctccagccttgtttggtgaagttgttgcacgactgagtttgtcgtgtggcttgagctttgaagttgttgaggagattctaaaagcagtggaggatacatacttccgcaaaggaatttttgatgctgtcatgaaaaccatgggcggaaactcttcaggtcaggctatattgagctcgcatgctgtggtaatcgacgcctgcaacaaacttctgaaataaacccagctttcttgtacaaagttggcattataagaaagcattgcttatcaatttgttgcaacgaacaggtcactatcagtcaaaataaa

SEQ ID NO: 241 - protein, 793 aa, Oryza sativa
MEKDHQPVISLRPGGGGGGPRPGRLFSPAFAAAASGSGDLLRSHVGGASKIGDPNFEVRERVRYTRDQLLELREIVDIPEAILRINQEIDIELHGEDQIWGRPESDVQVQTQTQAQPHNRYGETDNRDWRARTVQPPAANEEKSWDNIREAKAAHASSGRQQEQVNRQDQLNHQFASKAQVGPTPALIKAEVPWSARRGNLSEKDRVLKTVKGILNKLTPEKFDLLKGQLMESGITTADILKDVISLIFEKAVFEPTFCPMYAQLCSDLNEKLPSFPSEEPGGKEITFKRVLLNNCQEAFEGAESLRAEIAKLTGPDQEMERRDKERIVKLRTLGNIRLIGELLKQKMVPEKIVHHIVQELLGSGPDKKACPEEENVEAICQFFNTIGKQLDENPKSRRINDTYFIQMKELTTNLQLAPRLRFMVRDVVDLRSNNWVPRREEIKAKTISEIHDEAMKTLGLRPGATGLTRNGRNAPGGPLSPGGFPMNRPGTGGMMPGMPGTPGMPGSRKMPGMPGLDNDNWEVPRSKSMPRGDSLRNQGPLLNKPSSINKPSSINSRLLPHGSGALIGKSALLGSGGPPSRPSSLMASLTHTPAQTAPSPKPVSAAPAVVPVTDKAAGSSHEMPAAVQKKTVSLLEEYFGIRILDEAQQCIEELQCPEYYSEIVKEAINLALDKGPNFIDPLVRLLEHLHAKKIFKTEDLKTGCLLYAALLEDIGIDLPLAPALFGEVVARLSLSCGLSFEVVEEILKAVEDTYFRKGIFDAVMKTMGGNSSGQAILSSHAVVIDACNKLLK

SEQ ID NO: 242 - DNA, 2946 bp, Arabidopsis thaliana
aaaaaaaccctaataaagagaagggattgtgtctccttctcgacttcttcttcttcttctcatttctcaatctcaacttttctcttctcttctcttcttcgctaacggcaggagagagagagacccagaaatccgatccctcctctccttggattatcggagtcagcgattcatcgtcgctgataaagcttctacctttctcttcgatttttgttgtgagattcgattcgatcttaaggcggattagatcgaggtatgcagcaaggcgatcaaacggttctgagcttgagacctggtggcggtcgaggaaacagactatttggttcctcttcttcttcttcgtctctctcttttggctctctttcatcttcggatctacctctccttcgtcctcatggtggtgctcctgcttcctcttttcccttcaagggtggagactcgaggttcgatggccgtgaacgtgtgaagtacacccgtgagcagctcctggagcttaaagagaccactcaactctctgatgaaattctgagagtccaacgggaaactgcagctgaactgtttggtgaggaagggacttgggcacgtggagaaagtgtcgtaagcaatttggttcccgttcaatccgcaagtcgcttctctgagccagactctcgtgattggcgtagccgttctactcaacctccaccctctggggaggaaaggtcgtgggataatcttcgtgaagctaaagattccaggtatgttgaagcaagtcaatataatcgtcaagaccaacctaattcccagttttcaagggcaaacatatcatccaaccaagggggtggaccagctcctgtcctcgtcaaagccgaagttccttggtcagctagaagaggaaacctttctgaaaatgatcgtgttctgaagactgtgaaagggatactgaacaagctaacccctgaaaagtatgaccttctcaagggccaacttattgaatctggcatcacatctgctgatatcctgaagggtgtgattacccttatttttgacaaagctgtccttgagccgaccttttgccctatgtatgcaaaattgtgctctgatatcaacgaccagctgcccaccttcccacctgcagagcctggggataaggagattacatttaagagggttctactgaatatctgtcaagaggcatttgagggcgcttctcagttgagggaggagcttagacagatgagtgctccagatcaggaggctgagcggaatgacaaagaaaaattgttgaagctcaagactctaggaaatattcgtttgattggtgagcttttgaagcagaagatggtcccagaaaagattgttcatcacattgttcaggagcttctgggggccgatgagaaagtttgtccagccgaggaaaatgtcgaagctatttgtcatttcttcaaaactattggcaaacaacttgacggaaacgtgaagtcaaaacggattaatgatgtatatttcaaacgcctacaggctctgtcaaagaatcctcagttggaactgcgtctgagattcatggttcagaatatcatcgacatgcgctccaatggctgggttccaaggcgggaagagatgaaagcaagaactataaccgaaatacatactgaggcagagaagaatcttggtctccgaccaggtgccactgcaaatatgagaaggggtatggtttctagtggtgggcctgtgagccctggccctgtctaccctggtgggcgacctggtgcgggtggcttgatgcctggtatgcctgggacgcgaaggatgcctgggatgcccggagtggacaatgataactgggaggtaccccggacaagatcaatgtctagacgcgatgggccaggacctctacattctccagcagtgagcaagtcggcctcaatgaacacgaggctcttacctcaaggcagcagtggcattatgagtggcaagacaagcgcactgttgcagggaagtggttcagtgtcgcgtccagttaccgtgtcagcagaacggccagcacagtcagttgcacctctgaccgtaccagttccggtggagaaaccacagcctagtggtcccaagttgagcgaagaagtgctccaaagaaaaacaaagtcgcttctcgaggaatatttcaatgtccgactacttggtgaagctctgcagtgtgtagaggagcttggtttgccgtcatatcacccagagtttgtgaaggaagcaatatccctgtctcttgagaaaagcccgcctgtcgttgagccaattgctacactcttggagtatttgttatcaaagaaggtagtcgcacccaaggatcttgaaactgggttcttgctctacggtgctatgttggacgacattggaattgatcttcctaaggcaccaaacaattttggtgagattgtgggaaagctgattctggctggtggtgtggatttcaaattggttagagaaattatagggaagatggaagacgataggttccagaagatggtggtcgatgcagctgtacgcattgtggagtcaagcgagcaggggaagtccttgttggcctcacaggctgcagacatagaggcttgtcggaatctgtaaaaggaatcattacttgacgattttgctctctctgggtcttatgcttgtgcgatgaatgttgtgttgtaagcttgaaggaggaggagaaaaggattctcagaactcaaaaatagttttgctcttcgttgaagctttttcttatgacattattctcaccactcttctttgtgggcatgagtccatgtccttttttgtattcttctgtgacttgtctttttttgacctttgcatttttgttttacggtctcagttattatattcagttgattgttgttgagacttgagacccctataaactggtcggttcagataattacattggaaatgtttgatcatcgtcttcctatt

SEQ ID NO: 243 - protein, 802 aa, Arabidopsis thaliana
MQQGDQTVLSLRPGGGRGNRLFGSSSSSSSLSFGSLSSSDLPLLRPHGGAPASSFPFKGGDSRFDGRERVKYTREQLLELKETTQLSDEILRVQRETAAELFGEEGTWARGESVVSNLVPVQSASRFSEPDSRDWRSRSTQPPPSGEERSWDNLREAKDSRYVEASQYNRQDQPNSQFSRANISSNQGGGPAPVLVKAEVPWSARRGNLSENDRVLKTVKGILNKLTPEKYDLLKGQLIESGITSADILKGVITLIFDKAVLEPTFCPMYAKLCSDINDQLPTFPPAEPGDKEITFKRVLLNICQEAFEGASQLREELRQMSAPDQEAERNDKEKLLKLKTLGNIRLIGELLKQKMVPEKIVHHIVQELLGADEKVCPAEENVEAICHFFKTIGKQLDGNVKSKRINDVYFKRLQALSKNPQLELRLRFMVQNIIDMRSNGWVPRREEMKARTITEIHTEAEKNLGLRPGATANMRRGMVSSGGPVSPGPVYPGGRPGAGGLMPGMPGTRRMPGMPGVDNDNWEVPRTRSMSRRDGPGPLHSPAVSKSASMNTRLLPQGSSGIMSGKTSALLQGSGSVSRPVTVSAERPAQSVAPLTVPVPVEKPQPSGPKLSEEVLQRKTKSLLEEYFNVRLLGEALQCVEELGLPSYHPEFVKEAISLSLEKSPPVVEPIATLLEYLLSKKVVAPKDLETGFLLYGAMLDDIGIDLPKAPNNFGEIVGKLILAGGVDFKLVREIIGKMEDDRFQKMVVDAAVRIVESSEQGKSLLASQAADIEACRNLKESLLDDFALSGSYACAMNVVL

SEQ ID NO: 244 - DNA, 2370 bp, Glycine max
atgcagcagagtgatcaaacggtgttgagcttgaggcccggtggtggaagaggcagcaggctcctcgctcctcgattcgactcctcctcttcgtcctctgcttcccctgcttttggctccttttccgctgatcttcctctcctgcgtccccacgctggagctccctctcccttctctatcaaagctggagatgctcggtttgagggccgtgagcgtgtgcgatacacaagggaacagcttttacagcttaaagagggtgttgagatcctcgatgatgttttaaagatcaaacaagatattgaagctgaactttttggtgaagatcaaagttgggcccgcccagaaaacaaccccacacagcaatttcaaaatcgatatactgagccagataatcgtgactggcgtggaagatctggccaactttctggtaatgcagatgagaggtcttgggataatctcaaggagaatagggagtttggcaatactagtaatcgtcaagaccaactgaactctcagtttgcaaggacacaaatctcttctaaccaagggggaggacctactccgacactagtcaaggctgaggtgccatggtcagctagaaggggaactctctctgacaaggatcgcgtcttaaagacagttaaaggaatactaaataagttgactccggagaaatttgatctcctgaagggtcagttgatcgattctggcattacatcagccgacatattgaagggagttatttcgctgatatttgataaggcagtgctggaaccaacattttgccccatgtatgctcagctgtgttctgatcttaatgaaaagctgcctccattcccatctgacgagcctggtgggaaagaaatcacttttaagcgagtactcttgaatatctgccaggaggcttttgaaggtgcagataaactgagggaagaactgagacagatgactgcccctgaccaggagatggagcgacgggacaaggaaagacttgtcaagattcgaacccttggaaatatccgtttaattggtgagctgttgaagcaaaaaatggttcccgaaaagattgttcatcacattgttcaggagcttttaggacctccagacatcaaggtctgtccagctgaggaaaatgttgaagccatatgtcagtttttcaacactattggtaagcagcttgatgaaagcccaaaatcacggcgcataaatgatatgtactttatccggttgaaagaattgagcaccaatccccaacttgcaccacggctgcggtttatggttcgtgatgttctagatttgcgttctaataactggattccaagacgtgaagaggtgaaagccaaaaccatcactgaaattcattcagaggcagaaaaaaatcttggattgcgtccaggtgccactgcaagtatgagaaataaccgtgtagtttcaggcgctctaggaaataccagtccaggaggattcccaattgctcgacctggtacaggtggtttgatgccagggatgccagggaccaggaggatgcctgggatgcctggaattgataatgacaactgggagatgcctaagacaagatcaatgccgagaggagacatgtcaggcatgcaaactggaggacatagccagtctccctttctttccaagacatccactgttaactctaggttactacctcaaggtagtggtggtattataagtgggagaagcagtgccctggtgcatggagctggtgctccttctgctgctcggccaccaaaccttggttttagtgctgaacccacacctcaaatcccttcacctgttaaagctgtttctgccatacccgctgagaagccacaacctccagctgcaaaattgaattttgatgaacttcagcgtaaaactgtttctcttctggaagaatatttcaatgtccggcttttggacgaggcattacagtgtgtggaggaactaaaagctccagcttattaccctgagtttgtcaaggaagctatttcccttgctctagataaaagtccgccatgcgctgaacctgttgccaatctttttgaatatctgttcattaagaagattctttcagccagagacatagggactgggtgcatgttatttgcttctctgctggatgatatcggcatagatttacctaaagcaccaaataattttggtgagataatagggaaactagttttggctgggggtttggattttaaggtggtgacagaaatccttaagaaggtggaggatgaccggttccagaaagcaatattttcttctgcgttgcaggtaattacctctgcatctgggcaagctgtgctggatgcacaagcatctgatattgaggcctgccagagtctgttcaactga

SEQ ID NO: 245 - protein, 789 aa, Glycine max
MQQSDQTVLSLRPGGGRGSRLLAPRFDSSSSSSASPAFGSFSADLPLLRPHAGAPSPFSIKAGDARFEGRERVRYTREQLLQLKEGVEILDDVLKIKQDIEAELFGEDQSWARPENNPTQQFQNRYTEPDNRDWRGRSGQLSGNADERSWDNLKENREFGNTSNRQDQLNSQFARTQISSNQGGGPTPTLVKAEVPWSARRGTLSDKDRVLKTVKGILNKLTPEKFDLLKGQLIDSGITSADILKGVISLIFDKAVLEPTFCPMYAQLCSDLNEKLPPFPSDEPGGKEITFKRVLLNICQEAFEGADKLREELRQMTAPDQEMERRDKERLVKIRTLGNIRLIGELLKQKMVPEKIVHHIVQELLGPPDIKVCPAEENVEAICQFFNTIGKQLDESPKSRRINDMYFIRLKELSTNPQLAPRLRFMVRDVLDLRSNNWIPRREEVKAKTITEIHSEAEKNLGLRPGATASMRNNRVVSGALGNTSPGGFPIARPGTGGLMPGMPGTRRMPGMPGIDNDNWEMPKTRSMPRGDMSGMQTGGHSQSPFLSKTSTVNSRLLPQGSGGIISGRSSALVHGAGAPSAARPPNLGFSAEPTPQIPSPVKAVSAIPAEKPQPPAAKLNFDELQRKTVSLLEEYFNVRLLDEALQCVEELKAPAYYPEFVKEAISLALDKSPPCAEPVANLFEYLFIKKILSARDIGTGCMLFASLLDDIGIDLPKAPNNFGEIIGKLVLAGGLDFKVVTEILKKVEDDRFQKAIFSSALQVITSASGQAVLDAQASDIEACQSLFN

SEQ ID NO: 246 - DNA, 2328 bp, Glycine max
atgcagcaaggtgatccaacggtcctaagcttgaggcctggtggtggtcgtggcggtggaagcaggcttttcgctcactcgtcctcctcttcctctctctccgccgatctccctctctcgcgccctcatgcctctttctctctcaagactggagattcacggtttgagggtcatgagcgtgtgcgatataccagagatcagcttttacagcttaaagaggctgttgaggtccctgatgatattcttaagattaaacaagatatagaagctgaactttttggtgaagatccaagttggggccgtgctgaaagcaatcttcctcatcaattacaaaatcggtattctgagccagataaccgtgattggcgtggtcgttctggacaacctcctgctagtacagatgagagatcttgggaaaacctcagagataaccgagagtttggtaatagacagcaggatgctagtcaggttaatcgccatgaccaacttaattcccagtttgcaagaacacaaatctcttctatgcaagggggaggacctactcctacgctagtcaaggctgaggttccgtggtcagccagaaggggaagtctatctgaaaaggatcgtgtattgaagactgtgaaaggaatactcaataagttgactcctgagaaatttgatgtcctgaagggtcagttaatcgattctggcattacatcagctgacatcttaaaggatgtcatttcacttatttttgataaggctgttctagaaccaacattttgccccatgtatgctcatctgtgttctgatctaaatgaaaagctgcctccattcccatctgaagaacctggtgggaaagaaatcacctttaagagagtgctcttgaataattgccaggaggcttttgaaggtgctgaaaatctgagggaggaactaaaaaggatgactgtccctgagcgggagatggagcgtacggacaagggaaggctgctcaagctacgtacccttggaaatatccgtttaattggtgagctattgaagcagaagatggttcctgaaaagattgtccatcacattgttcaggagcttttaggatccccagacagcaaatcttgcccagttgaggaaaatgttgaagccatatgtcagtttttcaatactattggcaagcagcttgatgaaagtcctaaatcacggcgtataaatgatatttactttagccgattgaaagaattaagctcaaacctacaacttgtaccccggcttaggttcatgattcgggatgttatagagttgcgtgctagtaactgggttcctagacgggaagaggtcaaagccaaaaccattactgaaattcattcagaggcagaaaaaaatcttggtttgcggccaggagcaactgcaagtatgagaaattcccgtggcggtgttcaaggaaatgccagctctgggggctttcatattgctcgacctggtgctgggggtttgatgcctggaatgccagggaccaggaagatgcctggatttgataatgacaactgggagatgcctaagactagatctatgccaagaggagattcttcaggagttcaagctgctggatgcagcaactctgctttactttccaagtccacaaccctcaattcaaaactgctacctcaaggtagtggtggtattataagtggaagaaatagtgccctagtacatggaggtggtacattttctacttcctcaacaaacttttgtttaggtcctgaggcagcgcctcaactctcttcacctgctcctgttcctgtatcctctgagaagccacaacctccagctgcaagattgaatactgatgatctttgccgcagaactgtctctcttctagaagaatatttcagtgttcggcttttggaagaggcattacagtgtgtggaggaattaaaatctccttcttaccaccctgaggttgttaaggaagccatataccttgcacttgataaaagtccaccatgtgttgaaactgttgccaatctcattgagtatctgtatattaagaagattcttacccctttagacatagggactggctgtttgttatttggttctctgctggatgatattggcatagatttacctaaagcaccaagtaattttggtgagataattgggaaactaattttggctgggggattggattttaaggtggtgggagagattctcaagaaggtggatgatgacatgttccggagagcaatatttgacagtgtggtgggggccattagatctgcatccgagcaagccattttggatgcacaaacttctgatattgaggtctgccagagtcagctcaagtga

SEQ ID NO: 247 - protein, 775 aa, Glycine max
MQQGDPTVLSLRPGGGRGGGSRLFAHSSSSSSLSADLPLSRPHASFSLKTGDSRFEGHERVRYTRDQLLQLKEAVEVPDDILKIKQDIEAELFGEDPSWGRAESNLPHQLQNRYSEPDNRDWRGRSGQPPASTDERSWENLRDNREFGNRQQDASQVNRHDQLNSQFARTQISSMQGGGPTPTLVKAEVPWSARRGSLSEKDRVLKTVKGILNKLTPEKFDVLKGQLIDSGITSADILKDVISLIFDKAVLEPTFCPMYAHLCSDLNEKLPPFPSEEPGGKEITFKRVLLNNCQEAFEGAENLREELKRMTVPEREMERTDKGRLLKLRTLGNIRLIGELLKQKMVPEKIVHHIVQELLGSPDSKSCPVEENVEAICQFFNTIGKQLDESPKSRRINDIYFSRLKELSSNLQLVPRLRFMIRDVIELRASNWVPRREEVKAKTITEIHSEAEKNLGLRPGATASMRNSRGGVQGNASSGGFHIARPGAGGLMPGMPGTRKMPGFDNDNWEMPKTRSMPRGDSSGVQAAGCSNSALLSKSTTLNSKLLPQGSGGIISGRNSALVHGGGTFSTSSTNFCLGPEAAPQLSSPAPVPVSSEKPQPPAARLNTDDLCRRTVSLLEEYFSVRLLEEALQCVEELKSPSYHPEVVKEAIYLALDKSPPCVETVANLIEYLYIKKILTPLDIGTGCLLFGSLLDDIGIDLPKAPSNFGEIIGKLILAGGLDFKVVGEILKKVDDDMFRRAIFDSVVGAIRSASEQAILDAQTSDIEVCQSQLK

SEQ ID NO: 248 - DNA, 2340 bp, Medicago truncatula
atgcagcaaggtgatcaaacagttcttagcttgaggcctggtggtggtcgaggaaacaggcttctcgctcctagattcgattcttcctcttccaattcacctgcttttggttccttttcatctgatctttctcatcttcgtcctaatgctggtgcttcttctctcctcgctttcaaggttggagattcgcagttcgaaagccgtgagcgtgtgcgatataccaaagaagagcttttacatattagagagactcttgaggagacccctgaggatattttaaagctcaggcatgatattgatgctgaactttttggtgaagatcaaagttggggccgtgtagaaaacaatcccccaactcaaattcaaaaccgatactctgaaccagataaccgtgactggcgtggccgttctgcacaacctcctgctaacgcagatgagaggtcttgggataatatcaaggaaaatagagaatttggcaatactagtcaggttaatcgtcaagaccaaccaaggactaaccaagggggaggacctgctcctactctagtcaaggctgaggtaccatggtctgccagaaggggaactctctctgacaaggatcgtgtcctaaagactgttaaagggatactaaacaagttgactcctgaaaaatttgatctcctgaagggtcaattgatcgattctggcattacatcagctgacatattgaagggagtcatttcattgatatttgataaggcagtgctggaaccaacattctgccccatgtatgctcagctgtgttctgatcttaatgagaagctgccttcattcccatctgaagaatctggtgggaaagaaataacttttaagagattactcttggataattgccaggaagcttttgaaggtgctggcaaactgagggaagaattggcgcagatgacttcccctgagcaggagacagagcgacgtgacaaggatagacttgtcaaaattcgcacccttggaaacatccgtttaattggtgagctgctgaagcaaaaaatggttcctgaaaggattgtccatcacattgttcaggagcttttgggagctgctgacagcaatgtgtgtccggctgaggaaaatgttgaagccatatgtcattttttcaacactattggcaagcagcttgatgaaagcccaaaatcacgacgtataaatgatatgtactttggccggttgaaagaattgagcacaaatcctcaacttgcaccacggatgaaattcatggttcgtgatgttattgatctgcgtgctagtaactgggttccacgacgtgaagagatcaaggccaaaaccatcagtgaaatccatgatgaggcagaaaagaatcttggattgcgtccaggtgccactgcaggtatgagaaacacccgtgttactggtgttcaaggtaacacgggagctgggggcttccccattgcccgacctggtacaggaggtttaatgcctgggatgccgggtgcaaggaagatgcctgggatgcctggtattgataatgataactgggaggtgcctaggactagatctatgccaagaggagacatgtctggcgctcaaactggaggacgtggacaatctccttatctttccaagccatcagtcataaactcaaagttactgcctcaaggcagtagtggtcttataagtgggaagaatagtgccctggtgcttggaggtggtactccttctgctctaccatcaaacattgtttcaggtacagagcctgcacctcaaatcccttcacctgttaaacctgtttctgccgcatcccctgagaagccacaggccccagctgtaaagttgaatattgacgatctccaccgcaaaactgtctctcttttggaagaatatttcaatgttcggcttttggacgaggcattacagtgtgtggaggaactaaaagctccgacttatcacccagaggttgtgaaggaagccatttcccttggactagataaaagtccaccacgtgttgaacctgttgccaatcttattgagtatctgtttacgaagaagattctcacagctagagacatagggactggatgtttgttatttgcttctctgctggatgatattggcatagatttacccaaagcaccaaataactttggtgagataatagggaaactagttttgtccgcgggtttggactttaaggtggtcaaagagatccttaagaaggtgggtgacgactacttccagaaagcaatattcaactctgcagtacaggtaattagctctgcatccgggcaagctgtgttggattcacaagcatctgatattgaggcctgccaagctctgtttgagtga

SEQ ID NO: 249 - protein, 779 aa, Medicago truncatula
MQQGDQTVLSLRPGGGRGNRLLAPRFDSSSSNSPAFGSFSSDLSHLRPNAGASSLLAFKVGDSQFESRERVRYTKEELLHIRETLEETPEDILKLRHDIDAELFGEDQSWGRVENNPPTQIQNRYSEPDNRDWRGRSAQPPANADERSWDNIKENREFGNTSQVNRQDQPRTNQGGGPAPTLVKAEVPWSARRGTLSDKDRVLKTVKGILNKLTPEKFDLLKGQLIDSGITSADILKGVISLIFDKAVLEPTFCPMYAQLCSDLNEKLPSFPSEESGGKEITFKRLLLDNCQEAFEGAGKLREELAQMTSPEQETERRDKDRLVKIRTLGNIRLIGELLKQKMVPERIVHHIVQELLGAADSNVCPAEENVEAICHFFNTIGKQLDESPKSRRINDMYFGRLKELSTNPQLAPRMKFMVRDVIDLRASNWVPRREEIKAKTISEIHDEAEKNLGLRPGATAGMRNTRVTGVQGNTGAGGFPIARPGTGGLMPGMPGARKMPGMPGIDNDNWEVPRTRSMPRGDMSGAQTGGRGQSPYLSKPSVINSKLLPQGSSGLISGKNSALVLGGGTPSALPSNIVSGTEPAPQIPSPVKPVSAASPEKPQAPAVKLNIDDLHRKTVSLLEEYFNVRLLDEALQCVEELKAPTYHPEVVKEAISLGLDKSPPRVEPVANLIEYLFTKKILTARDIGTGCLLFASLLDDIGIDLPKAPNNFGEIIGKLVLSAGLDFKVVKEILKKVGDDYFQKAIFNSAVQVISSASGQAVLDSQASDIEACQALFE

SEQ ID NO: 250 - DNA, 2343 bp, Oryza sativa
atgacgcaggcggatcaggcggtgatcagcctgcgcccgggcggcggcggcggcatcggtggcccgcgcgccggccgcctcttccccttcggcgcctccacaggctccctcgacttcctccgcccgcgcggcggcgcatcctccggcttcgctgccaagcttggagacttgcggtttgaacctctcgagcgggttcgttacactagggatcaacttgttgaactgcatgagattatcgacatacctgagaacatcttgaagcttaagcaagatattgacatagaactccatggtgaagatgaaccctggattaacaatgactcaagtgtgcaaactcagtcatataaccgctacgctgagacagacaaccgtgattggcgttcacggattgaacaacctgtgcaaactcctgctattggtggtgaagagaaatcttgggacaaatttcgtgaagcaaaagaatcatacatttcaagtggaaagcaagatcaatttaataatcaagacaaattgagctcccagttcagtgcaaaagctcaggttggtccggctcctgctcttgtcaaggctgaagtcccttggtcaatccagagaggcaatctctccaacaaagaaagagttctgaaaacagtgaaaggtatactgaacaaattgactccagaaaagtttgatcttcttaagggccagttaattgaagcagggatcactacagctgatattttgaaggatgttattagtctcatatttgagaaggctgttcttgagcctaccttctgtccaatgtatgctcagctttgctttgatctcaatgagaagttaccctcattcccttctgaagaacctggtggtaaagagatcacgttcaaacgtgtgctgttgaacaattgccaagaagcatttgaaggtgctgacaatctgcggtctgaggtcaataaattgactggtctagaccaagagatggagagacgtgataaagaaaggctagtgaagcttcggacacttggaaacattcgtcttgttggtgagctacttaagcaaaaaatggtccctgagaagatagtacatcacattgttcaggagctattaggttctgaaagcaacagatgccctgctgaggaaaatgtggaggccatctgtcagttcttcaacacaattggtaaacagttggatgagaatccaaagtctcgacgatttaatgacgtatacttcaaccggctgaaggatctaacaactaattctcagttggcatcacgattgaggttcatggcacgcgatgtccttgatcttcgttcaaaccaatgggtgcctcgacgtgaagagatgaaagctaagaaaatcagtgaaattcatagagaggcagaaaacaatcttggattgcgtccagggtcgactgcaagcataagaactggccgtactggtactggaggtggaggacccctttcaccaggagctttttctatgaaccaacctggtatagttggcatgttgcctggtatgcctggagcgagaaagatgcctggaatgccagggctaggtagtgatgactgggaagttccgcattctagatcaaagcccagagctgatccagttcggaacctcaccccatcattggccaataagccatcacctaataattccagactgcttcctcaaggcagtgcagcattaattagtggcaagacgagtgcacttgtgggcagtggtggcccactatcccatggtctggttgtcacaccatctcaaactacaggaccaccaaaatcactcatcccagctccatctgtagatcctatagttgagcaaccagctgctgcccccaagccaagctctacagagcttcagaagaagaccatatctcttcttaaggagtatttccacatacttcttctacatgaagcacaacagtgcattgaggagctgaagagtcctgattactacccagaagttgttaaagaagccatcaatcttgctcttgataaaggcaccaattccatcgatcctcttttgaggctgttggagcatctctacaacaagaatgttttcaaagcgactgacttggaaactggatgcttgctttacagttctcttcttgatgagcttgctattgaccttccaaaagctccagtacattttggtgaagttattgggcggctggtcttgtcacattgcctgagcatagaagtcgttgaggatactctaaagaaaattgaggacagtttctttcgtgctgcagtgtttgaagctatgatgaaaatcatgaaagcaaatccatcaggtcaggctatcttgggctcacatgttgctaagatcgacgcgtgcagcaaacttctatcctcggaataa

SEQ ID NO: 251 - protein, 780 aa, Oryza sativa
MTQADQAVISLRPGGGGGIGGPRAGRLFPFGASTGSLDFLRPRGGASSGFAAKLGDLRFEPLERVRYTRDQLVELHEIIDIPENILKLKQDIDIELHGEDEPWINNDSSVQTQSYNRYAETDNRDWRSRIEQPVQTPAIGGEEKSWDKFREAKESYISSGKQDQFNNQDKLSSQFSAKAQVGPAPALVKAEVPWSIQRGNLSNKERVLKTVKGILNKLTPEKFDLLKGQLIEAGITTADILKDVISLIFEKAVLEPTFCPMYAQLCFDLNEKLPSFPSEEPGGKEITFKRVLLNNCQEAFEGADNLRSEVNKLTGLDQEMERRDKERLVKLRTLGNIRLVGELLKQKMVPEKIVHHIVQELLGSESNRCPAEENVEAICQFFNTIGKQLDENPKSRRFNDVYFNRLKDLTTNSQLASRLRFMARDVLDLRSNQWVPRREEMKAKKISEIHREAENNLGLRPGSTASIRTGRTGTGGGGPLSPGAFSMNQPGIVGMLPGMPGARKMPGMPGLGSDDWEVPHSRSKPRADPVRNLTPSLANKPSPNNSRLLPQGSAALISGKTSALVGSGGPLSHGLVVTPSQTTGPPKSLIPAPSVDPIVEQPAAAPKPSSTELQKKTISLLKEYFHILLLHEAQQCIEELKSPDYYPEVVKEAINLALDKGTNSIDPLLRLLEHLYNKNVFKATDLETGCLLYSSLLDELAIDLPKAPVHFGEVIGRLVLSHCLSIEVVEDTLKKIEDSFFRAAVFEAMMKIMKANPSGQAILGSHVAKIDACSKLLSSE

SEQ ID NO: 252 - DNA, 2643 bp, Populus trichocarpa
atgcaggcagatcagacaacggtgataagcttgagaccaggaggaggtagcaatggtgtctttcccttctttcaagtttttgtgttacctgctactggtgaattgcggtttgaagaccatgagcgcattcgctacacgcgagaccaactgttgcaacttaaagaggttgaaaatgttccagaggatattctgaagatcagacaagaaattgagtccgagtttgttggtgaggatcaaacttggagccatgcagatggcagcctccagcctcaatctcagagtcgttattctgagccagacaaccgtgattggcgtggtaggtcagcagcttttggagaggacagatctcgggaagcaattcgagaaaataaggagttttacaaccggcaagaccagctaaactcccagtttgcaagtgctcaaatcactgctaaccaacgggtagggcctgctcctgctctgatcaaggctgaagtgccatggtcagttcgaagaggcaatctctctgaggaggaacgtgtcttgaagacagtgaaaggtatattaaacaaattgacaccagagaagtttgatgttctcaaggggcaactgattgactctggaattacgacacctgatattttaaagggtgttatctcactaatatttgacaaggcagtgctggagcccacattctgtcccatgtatgctcttttatgctctgaccttaatgagaagcttcctccattcccatctgatgagcctggtgggaaagaaatcacttttaagcggattcttttgaacaattgccaggaggcatttgaaggtgctggcaatctgagggcagaaattagcaagttgactgctcctgaacaagaaatggaacgcagggataaggaacgattggttaagctgcgaactatggggaacatgcgccttattggggaacttttgaagcagaagatggtgcctgaaaagattgtccaccatattgttcaggaattattgggcaatgacagtaaaacttgcccagcagaagaaaatgtcgaggcaatatgtcaatttttcaacaccataggcaagcaactggatgaaaacccaaaagctcggcgggttaatgatgtttatttcagcaggttgaaggagttgacaacaaatccacatcttgcaccacggtgtaggttcatggttcgtgatgtccttgatcttcgggctaacagctgggtccctagacgtgaagaggttaaagcaaagaccatctctgaaatccattcagaagctgagaagaatctcggattgcgtccaggtgcaactgcagtcatgagaaatggtcgtaatgctactgggggtgtgggccctggtggtttccccattggccgaccaggctcagggggtatgatgcctggaatgcctgggatgatgaaaatgcctggaattcctgggcttgatgctgacaactgggaagttcctcgatctagagcaatgccaaggggcaatagttttggcccaacccacgtcgccgggcatgtccccacttccctgatcaacaaatcaccaccacttaatgcaagacttctacctcagggaagtggtggcgtcatagctgggaaaccaagtctgctattgcagggcagtggtgctccttcccgacctggttttgctacaagaactgaacctgcaggtcaaactcctaagcctgttgctccagctgtgtcagcaattccttctcctcagaagcctcttgctcctactacaaggtcaaatcctgatgatcttcgcagaaaaaccatttctctgctggaagaatatttcagtgttcgaattcttgatgaagcacttcaatgtgtggaggagttgaaagatactagttttcaccctgaggttgctaaagaagctattgctcttgcactggagaagagcccaccctgtgtggaacctgtcgtaaagcttcttgaattcttgctcactaaaaatgtcctcacagctagagatattggaactggatgtcttctttatggctcatcgttggatgatattggcattgatttacccaaagcaccaaataactttggtgagattcttgggagcttggttgtggctcagggtctggacttcgaggtgtttaaggaagttctgaagaaggtggaagatgacaggttcaggaaagctatatttagcagtgccatgatgagcatcaattcaaacccttctgggcaagaagtgttggcaacacagggttctaatattcaggcttgtgagagtttgctctcttaattagagcaaaattctcattagcccttatgggaagttgtgcagccttgtggagcccacgaaaccaaaccattccgcccttttgctttccataattcactgaaattcaaagattaccgcatttcagcagcagaccaggaagaacagataatttaaaagagttgtatattttccaaggtttcctcatgatctttgcttgttatgctagaaacatgaagcttttgtatttcttgagtgcccattaagtctctctcagagaggacactcgagattaacgagtctttacattttccagcttcctaaatttagatttcaagtcatgtaccacagttgaaaattttgttactttcccattgaaggggcccaattttctccattaatgatgtctttttt

SEQ ID NO: 253 - protein, 750 aa, Populus trichocarpa
MQADQTTVISLRPGGGSNGVFPFFQVFVLPATGELRFEDHERIRYTRDQLLQLKEVENVPEDILKIRQEIESEFVGEDQTWSHADGSLQPQSQSRYSEPDNRDWRGRSAAFGEDRSREAIRENKEFYNRQDQLNSQFASAQITANQRVGPAPALIKAEVPWSVRRGNLSEEERVLKTVKGILNKLTPEKFDVLKGQLIDSGITTPDILKGVISLIFDKAVLEPTFCPMYALLCSDLNEKLPPFPSDEPGGKEITFKRILLNNCQEAFEGAGNLRAEISKLTAPEQEMERRDKERLVKLRTMGNMRLIGELLKQKMVPEKIVHHIVQELLGNDSKTCPAEENVEAICQFFNTIGKQLDENPKARRVNDVYFSRLKELTTNPHLAPRCRFMVRDVLDLRANSWVPRREEVKAKTISEIHSEAEKNLGLRPGATAVMRNGRNATGGVGPGGFPIGRPGSGGMMPGMPGMMKMPGIPGLDADNWEVPRSRAMPRGNSFGPTHVAGHVPTSLINKSPPLNARLLPQGSGGVIAGKPSLLLQGSGAPSRPGFATRTEPAGQTPKPVAPAVSAIPSPQKPLAPTTRSNPDDLRRKTISLLEEYFSVRILDEALQCVEELKDTSFHPEVAKEAIALALEKSPPCVEPVVKLLEFLLTKNVLTARDIGTGCLLYGSSLDDIGIDLPKAPNNFGEILGSLVVAQGLDFEVFKEVLKKVEDDRFRKAIFSSAMMSINSNPSGQEVLATQGSNIQACESLLS

SEQ ID NO: 254 - DNA, 2950 bp, Populus trichocarpa
gaccggcctcacatactctcttctcttctttgctcttcgcagaagagagagtagaaaacccaaaaaaacctctcttcttatttctctatcttgaatcagctcttgcttttattattagcagttgaatctgtcactttcttggtttattctttctttttgattggactgtgtggattggaatttaaaaacgagtgaaagaccgagttatgcagcaaggtgatcagacggtgttaagcttaagacctggtggtggtcgagggagtagactcttcaatcctcgcttggagcagtcctcttcttctacatcttcttctatttctttcggtgatctccctctcttgcgtcctcatggcggtgctacttcttttaagactggagacttgcggtttgagggtcgtgagcgtgttcggtacactagagaccaactgttgcagcttagagaggctgttgtaatctttgatgagattctaaaaatcaaacaagaaattgaagctgagctttttggtgaagatcagagctggagtcgtggagaaaccaatcctccaactcaatctcagattcgttattctgagccagacaatcgtgattggcgtggtcgttctgctcaattttctccatctggagaggagaggtcccgggattctattcgagaaaatagagactttggtgggagatatgactccagacagcaagaaggcaatcagtctaatcgtcaagaccagctcaactcccaattcgcgagggcacaaatctcttcccatcagggaggacctgctcctgctttggtcaaggctgaggtaccatggtctactagaagggtgaatctttctgaaaaggaacgtgtcttgaagactgtaaaaggtatactgaacaagctcacccctgagaagtttgatgttctcaagggtcaacttattgattctggaattacatcaactgatatcttgaagggtgtgatatcacttatattcgacaaggctgttcttgaacccacattctgccctatgtacgcacaactgtgctctgatcttaatgaaaagctcccctcattcccatcagatgaacctggtgggaaagagatcacatttaagcgggtgctcttgaatatctgtcaagaggcatttgaaggtgctgataagctgagggaggaattaaggcagatgacagctccagagcaagagcttgagcgtagggacaaggaaaaactggtcaagcttcgcactcttggaaacatgcgtttgattggagagcttctgaagcagagcatggttcctgaaaagattgtccatcatattgttcaggagcttctagggcccgataataaaggttgtcctgcagaagaaagtgttgaggccatatgccagttctttaataccattggtaagcagcttgatgaaagcccaaagtcgcgacgaataaatgatgtgtactttggtcgattgaaggaactggcatcaaatcctcagctggctccccgactgaagttcatggtgcgcggtgttcttgacctacggatgaacaactggattcctaggcgtgaagaggtcaaagctaaaaccatcacagagatacattctgaggcagaaaagactcttgggctgcgtccaggtgctactgcaagcattagaaataaccgtggtcttatatccaccgctccagggactactggccctgggggcttccccatcaaccgacctggaactggggggatgatgcctggcatgccaggaactaggagaatgcctgggatgcctggaattgataatgacaaccgggagatacctagaaaccgcccaatgccaaggggtgatggtcctatgcagcttgggggacgtgtccaatcaccaatgtttaacaagtcatcactaaacaccaggctgttacccgagggcagtggtggttttataggtggtaggagtagtgccctcctgcatggaagtggcggtcctccttctaggccatcaaactctggttttggtgcagagcctcctgctcaagcctctctgcctagtaaaacccttcctgctccttccgtgcctccagtttcagagagaccagttgtttcagctgctagggtgaatcctgatgaactcaagagaaagactgtctcactcctgaaggaatatttcagtgtcttgcttctggatgaggcattgcaatgtgtggaggagctgaagtctccaggttatcaccctgaagttgtcaaggaagctatcttcattgcactagaggcaaacccaccatgtgttgaaccagttgccaaacttttggaatatttgttttccaagaaggtcctcacagctaaagacatagggaccgggtgcttactctatggttctatgttggatgatattggcattgatttgccaaaggcaccaaataattttggtgaaattatcgggaaattagttttggttgggggattggactttaaaatggtaatagaagtccttaagaagatggaggatgatatgtatcggagagccatgtttgatgcagcaataagggtcattatttcaagtccggatgggcaacttgtattagacactcaagcatccgccattgaggcttgccggagtttgttttagtaagtcttaccattctatttcgtgagtacttcaccatctgtatccaacttttttgtgcttacgtttacttcataatgccccgcctacaccattttgaggcgagcaacttgtactatgtgataaggtggagctgccaagaacatgacatattttttgagttgtatattttttcctgagatcatagttgtgtgttaccgaagaaagaaatcaaaccataatgctgtggatattggtctcgtgtgcctgtagctcgagaagcatgccccttcaagggatccagttgttttgtatttgattagttttcaatttttgttctcttgactgagtaatttagtttattatttgaactcagctcataaatc

SEQ ID NO: 255 - protein, 793 aa, Populus trichocarpa
MQQGDQTVLSLRPGGGRGSRLFNPRLEQSSSSTSSSISFGDLPLLRPHGGATSFKTGDLRFEGRERVRYTRDQLLQLREAVVIFDEILKIKQEIEAELFGEDQSWSRGETNPPTQSQIRYSEPDNRDWRGRSAQFSPSGEERSRDSIRENRDFGGRYDSRQQEGNQSNRQDQLNSQFARAQISSHQGGPAPALVKAEVPWSTRRVNLSEKERVLKTVKGILNKLTPEKFDVLKGQLIDSGITSTDILKGVISLIFDKAVLEPTFCPMYAQLCSDLNEKLPSFPSDEPGGKEITFKRVLLNICQEAFEGADKLREELRQMTAPEQELERRDKEKLVKLRTLGNMRLIGELLKQSMVPEKIVHHIVQELLGPDNKGCPAEESVEAICQFFNTIGKQLDESPKSRRINDVYFGRLKELASNPQLAPRLKFMVRGVLDLRMNNWIPRREEVKAKTITEIHSEAEKTLGLRPGATASIRNNRGLISTAPGTTGPGGFPINRPGTGGMMPGMPGTRRMPGMPGIDNDNREIPRNRPMPRGDGPMQLGGRVQSPMFNKSSLNTRLLPEGSGGFIGGRSSALLHGSGGPPSRPSNSGFGAEPPAQASLPSKTLPAPSVPPVSERPVVSAARVNPDELKRKTVSLLKEYFSVLLLDEALQCVEELKSPGYHPEVVKEAIFIALEANPPCVEPVAKLLEYLFSKKVLTAKDIGTGCLLYGSMLDDIGIDLPKAPNNFGEIIGKLVLVGGLDFKMVIEVLKKMEDDMYRRAMFDAAIRVIISSPDGQLVLDTQASAIEACRSLF

SEQ ID NO: 256 - DNA, 3098 bp, Ricinus trichocarpa
ttcttctttctcttctcttctcttctcttctctgtttctcaaacagaagagagagaaacgcaaaccaatctctctctctttctctctttctctctctaaaaactatcctttctatcactacccatctatctatctatatatatatatatatatatatatacaaacattgaaactatcctatatcttgattcagcttttgttattgtaagctgaatctttgttttgtttttttctttcttctcgttctcgtgcgttttttgattggacggcggagattaaatcttcttagagtgaaagatcgaggtatgcagcaaggtgatcagacggtgttgagcttgagacctggtggtggtcgaggaggaagcagcagactctttaatccacgcttagagtctaattcttcttcttcatcttcttcttctattgcttttggtgatctccctcttctgcgccctcatgccggtgctcctctaaagactggagactcaaggtttgaggtccgtgatagagtgcggtacacgagagaccagctgttgcagcttagagaggctgttgtcatctctgatgagattttaaaaatcaaacgagaaattgaagctgagctttttggtgaagatcaaagctggagtcgtggagaaagcaatccaccaaatcagcccccgagtcgctactcagagccagataatcgtgactggcgtggtcgttctgcacaattttctacctctggagaggagaggtcttgggattctcttagagaaaacagagagactggcgggcgatatgactccagacagacagaagcaaatcaatttaatcgtcaagaccaacttaactcccaatttgcaagagcccaaatctcttccaatcaatcgggcggccctgctccagctttagtcaaggctgaggctccatggtcagctagaagagggaatctttctgagaaggagcgtatcttgaagactgtaaaaggtatactgaacaagcttactcctgagaaatatgatcttctcaagggtcagcttatcgactctggcattacatctgccgacgtcttaaaggatgtgataaagcttatatttgagaaggctgttctggagcccactttttgtcccatgtatgctcagctatgttctgatcttaatggaaggcttccctcattcccatcagaggaaccaggtgggaaagagataacattcaagcgagctcttctgaatatctgccaggaggcatttgatggtgctgataaactgagggaggaacttaggcagatgacatctccagatcaggagcttgaacgcagggacaaggaaagattggtcaagcttcgtacccttggaaacatccgtttgattggagagcttctgaagcagaagatggttcctgagaagattgttcatcatattgtcatggaacttttgggatctgataacaaagtttgtcctgctgaagaaaatgttgaggccatatgccagttcttcaacactataggaaagcagcttgatgaaagtctgaagtcgcagcgcataaatgatatgtactttaatcgattgaaggaactggcatcaaaccctcaacttgcaccacgtctaaggttcatggttcgtgatgttcttgatctgcggtcaaataattgggttcctagacgtgaagaggttaaagctaaaaccatcactgagatacattctgaggcagaaaaaaatcttggattgcgtcccggtgctacttcaagtattagaaatagtcgtggtgttatttctgccgctccaggagctgctggtcctgggggctttctcatcaaccgacctggcactgggggtatgatgcctggcatgccaggtactaggaggatgcctggggtgcccggaattgataatgataattgggaagtacccaggacccgttcaatgccaaggggtgatggatcaactatgcagcctacggggcgtgtcccatcaccaatgtttaacaagtcatcctctgtgaatacaaggctgttacctcagggtagtggtggttttatgagtggaaaaagtagtgccctgttgcagggaagtggtggcccttctccccgcccatgcaacatcagtttgggtacagagcctcctgcacaggctcctgcgcctagaaaaattgtgcccactcctcatatgccaccagctgtggagaaaccagtggcttcagctgcaagcttcaatcccaatgaacttaggagaaaaacaatttcgctgttgaaggaatatttcagtgttcggcttctagatgaagcattgcagtgtgtggaagaactgaactctccagtctaccatcctgaaattgttaaggaagtcatctgtcttggcttggaggagaatccaccatgtgttgaaccagttgccaagcttttggagtatttgttttccaagaaggttctcacagctaaagacatagggactgggtgcttgctctatggttctatgttggatgatattggtattgatctgcccaaagcacctaataattttggtgaaatcattgggctactagttttggctggaggaatggactttaaagtggtgagagaggtccttaagaagatggaggatgatagatatcagaaagctatagttgatgcagcaatgaggactattagttatagtccagatggccaagttgtattagattcacaggcatctgatatcgaggcttgccaaactttgctgtagtaagcatagcattgcccaagtacctcagtgtctgtatccacatgaacctttgtgctttttttcgttttcgcattataatgccctgtccaaaaccttatgaggtgagcaacttgtactatgtgataaggtggagctgccaagaacaggtcatttttcttttttctttgtcagagtcatatttttctcctgaggtcatagctgtgtgttattgagcaaagaaatcaaaccataatgccatggattttgttctcgagcgtggctaattatgtgcctaagtgcttgggaaggccctttaagggatccagttgttttgtatttgattagttttgatcatcttcattttcttgacctcgattaatttagtttattgtttgaactacccaagtcataaatcgt

SEQ ID NO: 257 - protein, 798 aa, Ricinus trichocarpa
MQQGDQTVLSLRPGGGRGGSSRLFNPRLESNSSSSSSSSIAFGDLPLLRPHAGAPLKTGDSRFEVRDRVRYTRDQLLQLREAVVISDEILKIKREIEAELFGEDQSWSRGESNPPNQPPSRYSEPDNRDWRGRSAQFSTSGEERSWDSLRENRETGGRYDSRQTEANQFNRQDQLNSQFARAQISSNQSGGPAPALVKAEAPWSARRGNLSEKERILKTVKGILNKLTPEKYDLLKGQLIDSGITSADVLKDVIKLIFEKAVLEPTFCPMYAQLCSDLNGRLPSFPSEEPGGKEITFKRALLNICQEAFDGADKLREELRQMTSPDQELERRDKERLVKLRTLGNIRLIGELLKQKMVPEKIVHHIVMELLGSDNKVCPAEENVEAICQFFNTIGKQLDESLKSQRINDMYFNRLKELASNPQLAPRLRFMVRDVLDLRSNNWVPRREEVKAKTITEIHSEAEKNLGLRPGATSSIRNSRGVISAAPGAAGPGGFLINRPGTGGMMPGMPGTRRMPGVPGIDNDNWEVPRTRSMPRGDGSTMQPTGRVPSPMFNKSSSVNTRLLPQGSGGFMSGKSSALLQGSGGPSPRPCNISLGTEPPAQAPAPRKIVPTPHMPPAVEKPVASAASFNPNELRRKTISLLKEYFSVRLLDEALQCVEELNSPVYHPEIVKEVICLGLEENPPCVEPVAKLLEYLFSKKVLTAKDIGTGCLLYGSMLDDIGIDLPKAPNNFGEIIGLLVLAGGMDFKVVREVLKKMEDDRYQKAIVDAAMRTISYSPDGQVVLDSQASDIEACQTLL

SEQ ID NO: 258 - DNA, 3013 bp, Sorghum bicolor
cccttcccttcccctctcttccccgaaagagaggtcgcagacggaacccttccaccctccctgaccttcgattcctctgcgatttccccccgcgcgctcgccgattcctcgatcgactcccgcgcgattcgctttctggtcggattctctgcccccgaagcatgcagccggatcagcctgtgatcagcttgcgccccggcggcggcggcggcggcccgcgcgccggccgcctcttctcccccgccttcgccacctccggctccggagacttcctccgcccgcacggcgggggcgcctccggcatctccaagatcggcgagtcacattttgagccacgcgagcgtgttcgttacacaagagatcaacttcttgagctgcgtgagattgttgatgtgtctgaggacattctaaggatcaagcaagagattgatgtagagcttcatggtgaagatcagagctgggttcgcaatgattcagctattcaaggacaagcccaagcccaagcccaagctcaagcacaagcacagaatcggtatgctgagactgataaccgtgattggcgtgcacgatcagcacaaccgcctccggctaatgaagagaaatcttgggacaacatacgtgaggctaaagaggcctatgcctctagtggtaggcaacaagagcaagctaacaggcaagatcagttaagctcccagtttgcttcgaaagctcaggttggccccacccctgctcttattaaggctgaagtgccctggtcagcccgaagaggcaatctatcagagaaagaaagagtcttaaaaacggtgaaaggtatactgaacaaacttacaccagagaaattcgatcttctcaagggtcaactgatggaagctggaattactactgctgatattttgaaggatgttatatctctcatatttgagaaggcagtttttgagcccacgttctgtccgatgtatgctcaactttgttctgacctcaatgtaaagctcccgacattctctcctgaagagccagatggcaaagagatcacgttcaagcgcgtgctattgaacaattgtcaggaagcctttgaaggtgctagtagcttaagagctgaaattgctaaattaactggccctgaccaagagatggagagaagggacaaagaacggttggtcaaacttagaacacttggaaatattcgcctaattggtgagctactcaagcaaaaaatggttcctgagaagatagttcatcacattgttatggagctattggggtctgggcctgataagaagccatgccctgaagaggaagatgttgaggctatctgtcatttcttcaatacgattggtaaacagcttgatgagaacccaaagtctcggcggattaatgatacctacttcatccagatgaaggagctaacaatgaatcctcagctcgcaccacgattgaggtttatggttcgtgatgtgattgaactccgatcaaataactgggtgcctcgacgtgaggagattaaggccaagacaatcagtgaaattcactctgaggcagaaaagaaccttggattacgacctggagcagcatctgtcattaggaatggccgtagctcaccaggcggccccctttcgcctggaggtgggtttccaatgaatcgcccaggaactggaggcatgatgcctggaatgcctggttcaagaaagatgcctggaatgcctgggttggacaatgataactgggaagttcctcgttctagatcaatgccaagaggtgactcgattcgcaaccaggggccattgctcaataggccgtcaacagttcaaaaggcatcatctattaacacgaggcttcttcctcaaggcagtggcgcagcactaattggcaagagtgcacttttgggaactggtgttccaccatctcgtcctctcagctttacacctggaccagcaccagctcaaactacaccatcaccaaaaccattaattgcagcaccagctgttgcccctgctcctgataaaccagccagtgctcccaagggcaactctgctgagcttcagaagaaaacaatagctcttcttgaggagtatttcggcatacgtattttagatgaggcacaacaatgtatcgaggagttgcagagtcctggttactacccggaaattgttaaagaagctgtcaatcttgctctagataaaggcaccaattttgttgatcctctcatcaggctacttgagcatctgtacacaaagaaaattttcaagactcaagatctggaagccggttgcttgttatacggtgctctgctggatgacattggcattgacctccctaaagctccaacacaatttggtgaaattattgctcgcctgactttgttgggcgccttgagatttgaagctgtggaggaggttttaaagaaaatggaggatacattctaccgcaagcaagtttttaatgctgtcatgaaaaccttggaagcaaacccatcaggtcaggctatcttaggctcacaggctgctgtaatagacgcttgcaacagccttttgaaataatcgtcctagcagctttggcctatcaactttttcagatgctgtatcctgcagaagccagcgtcatgtattctctatagtttaggtgtccaaggaactcggtaccaaagatgtgaggaacagccagttttgagctgtataattttgcgagatcagatgagtgttgattattattgtttcgaccaggaaggaaagaaagaagccatggattttgctcttgggcggccagcttaatttgctggagccccagatgaacaaggctaaatgtgatgtttttgtgtccacctaaaatgttgttagttctttttctgtgactacacattttgtaacattgtactatggttttggaatgtttcgtcggttacaatatattgtgttatttaggagtcattgctcgatctgcctaggtcctggtttacccagttgctgccatgatgttcttgggctttggttttccatgctgtttaactggagatttg

SEQ ID NO: 259 - protein, 791 aa, Sorghum bicolor
MQPDQPVISLRPGGGGGGPRAGRLFSPAFATSGSGDFLRPHGGGASGISKIGESHFEPRERVRYTRDQLLELREIVDVSEDILRIKQEIDVELHGEDQSWVRNDSAIQGQAQAQAQAQAQAQNRYAETDNRDWRARSAQPPPANEEKSWDNIREAKEAYASSGRQQEQANRQDQLSSQFASKAQVGPTPALIKAEVPWSARRGNLSEKERVLKTVKGILNKLTPEKFDLLKGQLMEAGITTADILKDVISLIFEKAVFEPTFCPMYAQLCSDLNVKLPTFSPEEPDGKEITFKRVLLNNCQEAFEGASSLRAEIAKLTGPDQEMERRDKERLVKLRTLGNIRLIGELLKQKMVPEKIVHHIVMELLGSGPDKKPCPEEEDVEAICHFFNTIGKQLDENPKSRRINDTYFIQMKELTMNPQLAPRLRFMVRDVIELRSNNWVPRREEIKAKTISEIHSEAEKNLGLRPGAASVIRNGRSSPGGPLSPGGGFPMNRPGTGGMMPGMPGSRKMPGMPGLDNDNWEVPRSRSMPRGDSIRNQGPLLNRPSTVQKASSINTRLLPQGSGAALIGKSALLGTGVPPSRPLSFTPGPAPAQTTPSPKPLIAAPAVAPAPDKPASAPKGNSAELQKKTIALLEEYFGIRILDEAQQCIEELQSPGYYPEIVKEAVNLALDKGTNFVDPLIRLLEHLYTKKIFKTQDLEAGCLLYGALLDDIGIDLPKAPTQFGEIIARLTLLGALRFEAVEEVLKKMEDTFYRKQVFNAVMKTLEANPSGQAILGSQAAVIDACNSLLK

SEQ ID NO: 260 - DNA, 2903 bp, Solanum tuberosum
ggaaaagcatctctctctctctaaaaattcttactttctctctctaaaaatctaatcttttgtatctctatacacatatagatacacgtttatccgtatctatagctttttattgattcgtttttggtttagatttgccatttttcttttgtgtgtggaggtgttcgaattgatcggactgtggagaattgaggtatgcaggctgatcagacggtgataagtttgagaccaggtggtggtaacagaggtggtggaagcagagtatttggctctcgctttgatacctcatctaccaattctgatctctcagtttttcgtcctcatggtggttcttcatctttgccatctttcaagactggagattctcgttttgagagccatgaacgtgttcgctatactcgagatcaactcctgcaactgagggaggcggttgtcttacagttacctgaggtttttctgcaaatcaaacaagaaattgaagcggaactgtttggtgaagatgcctctcggggtcgtgtggataacaatgtgcaggttcagtctcagggtcgttattctgaaccagacaatcgtgactggcgtaataggccagcacaattttctgcccccatagaggagaggtcatgggaagcacttcgagaaaacagggaatttggtggccagtatactcggcaagagcaatcacagtttgcaagagctcaagtttctgccaaccaagggggaggtcctgctcctacactgatcaaagctgaggtgccatggtcagtccaaaggggcactctttctgacaaagctcgtgtcttgaaaacagtcaagggaatactcaacaagttgaccccagagaaatttgatcttctcaaaggccaattaatagattcagggataacgagtgcagacattctaaagggtgtgatctccttgatatttgacaaggccgtattggaacccaccttttgcccgatgtatgcccagttgtgttctgatctcaatgagaagcttcctccatttccatctgatgaacctggtgggaaagaaatcacgtttaagcgtgttcttctgaataattgccaagaggcatttgaaggtgctgacaaattgagggaagaggcgagacaaatgactgctccggagcaggagtcagaacgcaaggacaaagaaaggttgatcaaattgcgcactcttggaaacatacgtcttattggggagcttttgaagcaaaatatggttcctgaaaagattgttcatcacattgttcaggaactattaggacaagatcccaaaagctgtccagaagaagagaacgttgaagctatatgccaattctttaacaccattggtaagcagcttgacaagaagcaaaagtcaaggcacatcaatgatatgtatttcaaccgattgaaagaactatcaacaaatcctcagctggtagcacgcctaaagtttttggtgcgtgatgtgctggatttacgtgccaataactgggtccctaggcgggaagaggtgaaagccaaaaccattaatgagatccactcggaagcagagaagaccttggggttgcgtcctggtgctacattaagcattagaaatgctcgtgctcctccaagtgctcaagcgaatttgggtcctggtggctatcccattaatagacccggcactggtggtatgatgcctgggatgccaggagcaaggaagatgcctgggatgccaggaatggataatgacaactgggaggttcctaggtcacgaatgccaagaggtgctcagcaaccattgattggcaagtcgctgtccttgaacacaagactgttgcctcagggtagcaatgtcggcatgagtggcaggagtagcgccctcttacaaggtagtggtggacctcctgtccgaccatcaggctatgtctctggtatggagcctgtatcacaagttccagtaccagttaagccatctccaactagtaccgttttgcctgttgctgagaaacctcaggttccagctgcaaggtcaaatcccgaggagctgaaaagaaaaacagtttcacttttggaggaatattttagtgttaggattttggatgaagccttgcagtgcattgaggaactcaaatcccctgccttctatcctgaagttgttgagaaagccatatcacttggactggacaaaagcccaccacgcgttgaaccagttgcacaacttcttgaacacttgtttgctaaaaaggtttttagtgctacagacttggccactggatgcttgaactttgcttctcagttggaagatcttgcgatggatttaccaaaagcaccagcaaatttcggggagataatttcaaggctagttttgacaggggcaatggacttccagttggtgaatgagatcctgcagaaggtaaccgatgacttataccagaaggacttatttgctgccatcatgaaagctattagctctagccctactggtcaaggagtattagattcacaagcacctgatgtcgaagcctgcaaaaatctgttccagtaaaaagctcaaatcctcgtcaatggaatgtgctcgatatcacttatcctcgcaatggcctttccgttgtgctcagtggactaaagcaactgtatcacagtttttcataattggaactgtaaagaacaggtgagtttatgtgagttgtatacttttcccaacgtgtgttcattagacgacgaaagacagttttgcaacatggtaaattatacgccatatttgctcgaggcaacgggctgctttacgtagtccagccgttttgtattccattagtttttcatttattttttcccttttgacttgttatattaagttttgtcgaatttgtgagttcataaaatgcaactgttcctatctttacaccattttaaagctgaattttataactt

SEQ ID NO: 261 - protein, 773 aa, Solanum tuberosum
MQADQTVISLRPGGGNRGGGSRVFGSRFDTSSTNSDLSVFRPHGGSSSLPSFKTGDSRFESHERVRYTRDQLLQLREAVVLQLPEVFLQIKQEIEAELFGEDASRGRVDNNVQVQSQGRYSEPDNRDWRNRPAQFSAPIEERSWEALRENREFGGQYTRQEQSQFARAQVSANQGGGPAPTLIKAEVPWSVQRGTLSDKARVLKTVKGILNKLTPEKFDLLKGQLIDSGITSADILKGVISLIFDKAVLEPTFCPMYAQLCSDLNEKLPPFPSDEPGGKEITFKRVLLNNCQEAFEGADKLREEARQMTAPEQESERKDKERLIKLRTLGNIRLIGELLKQNMVPEKIVHHIVQELLGQDPKSCPEEENVEAICQFFNTIGKQLDKKQKSRHINDMYFNRLKELSTNPQLVARLKFLVRDVLDLRANNWVPRREEVKAKTINEIHSEAEKTLGLRPGATLSIRNARAPPSAQANLGPGGYPINRPGTGGMMPGMPGARKMPGMPGMDNDNWEVPRSRMPRGAQQPLIGKSLSLNTRLLPQGSNVGMSGRSSALLQGSGGPPVRPSGYVSGMEPVSQVPVPVKPSPTSTVLPVAEKPQVPAARSNPEELKRKTVSLLEEYFSVRILDEALQCIEELKSPAFYPEVVEKAISLGLDKSPPRVEPVAQLLEHLFAKKVFSATDLATGCLNFASQLEDLAMDLPKAPANFGEIISRLVLTGAMDFQLVNEILQKVTDDLYQKDLFAAIMKAISSSPTGQGVLDSQAPDVEACKNLFQ

SEQ ID NO: 262 - DNA, 2864 bp, Triticum aestivum
ccgcgatttcctcctcggccgcccgccgattccctgtcgatcgagctgtcgcggtgccttggtcggattcggcaccctcagccatgacgacagaccagccagtgatcagcctgcgccccggcggcggcggcggcgggccccgcggcggccgcctcttcgcccccgccttcgcggtcgccgcctccggctccggcgacttcctccgcccgcacggcggcggcgccttccgggctctccaggattggtgcttgcatctgagtcacgagcgtgttcgttattcaagagatcaacttcttgacctgcgcaagattactgatgtgaccgagcaaatcttgaggcttcagcaggaaattgaagcagagcttcatggtgacgatcagagctgggttcgcaacgattcaaatgtgcaattgcagacacagacacagacacaagtacaagctcaaaaccggtttactgagacagataatcgtgactggcgtgcacgcacagagaaacctccagcaccagcagttccagaagagaagtcttgggacaacattcgtgaggttaaagaacagtacaatgcaagtggcaggcagcaagagcagtttaacaggcaagatcaatcgagctcccagaaagctcaggttggcccacctcctgctcttatcaaggctgatgtaccttggtcagcccgaagaggcaatctctcggagaaagacagagtcctgaaaacagtgaaaggtatactaaacaaactgacgccagagaaatttgatctactcaagggggaactgctagattctggaattactactgctgatattttgaaggatgttatctctctcatatttgagaaggctgtttttgaaccgacattctgtccgatgtatgcccaactttgttctgaactcaatgacaacctcccgaaattcccttctgaagaaccaggcggtaaagagattacattcaaacgtgtgctgttgaacaattgtcaggaagcttttgaaggtgctgacagcctgagggttgagattgcaagtttgactggccctgaccaagagatggagaaaagggacaaagaaaggatcttcaaacttagaacgcttggaaatattcgtctaattggtgagctactcaagcaaaagatggttcctgagaagatagttcatcacattgtcaaggagctactggggtctgataaaaaggcttgccctgatgaggaacatgtcgaagcaatttgtcagttcttcaatacgattggtaaacagcttgatgagaacccaaagtctcgccgaatcaatgatacctacttcgtccagattagggagctagtagcgaaccctcagttgaccccacgttccaagttcatggtccgggatttgattgatctccgttctaacaactgggttcctcgccgtgctgagattaaggcgaagacaatcagcgagatccacacagaggctgaaaagaaccttggattacgtccaggggccacagcgaacatgaggaatggccgtaatgcaccaggtgggcctctttcgcctggaggtttttcagtgaaccggccaggaacaggaggtatgatgcctgggatgcctggatctagaaaaatgcctgggatgcctggtttagataatgataactgggaagttcagcgttctagatcaatgccaagaggcgatccgcttcgcaaccagggttcgttgattaataaggtttcatctattaacaagccatcacccatcaaccccaggcttcttcctcaaggcactggagcactgattggcaagagtgcactcttgggcaccggtggtccaccatcccgcccttccagcattacggctagccccactcctttaccagctcaaactacagcatcaccaaaaccatcaagtgcaactccagcttctgtacctattcctgacaaagcagccagttctgccaaggtgatccctgcagggcttgagaagaagacagcatctctccttgaggagtattttggtatccgtattttggatgaagcacaacagtgtatcgaggagctgcagagtcctgattaccaccctgagattgttaaagaagctatcaatcttgctctggataaaggtgccagttttgttgaccctcttgttaagcttctggagcatctgtacaccaagaaaactttcaagactgaagatctggaaaatggttgcttgctatatgggtcgctgttggaagatattggtattgaccttcctaaagccccaacgcaatttggtgaggtgattgctcgtctgattctgtcgtgtggcctgagatttgaagccgtggaggggattctaaaggcaatggaggacaccttcttccgcaaagcaatattcacctccgtgacgaaaaccctagaagcagacccagcaggccaggccatattgagctcacatgctgcagtagtcgacgcatgcaacagcctctcgatataacagctcttggcagctcaacttctcaggtgctgtgtctagtgaaaatcagcgtatggtgtattctctatagcttaggtgtttcaccgcagaggaactgggatgtgagcaacagccagttttgagctgtatatttttgcgaggtcacatgagtgttgattattgtttcgaggacagaaagaagccatggattttggtctctctggcgacggcggcctaactcttgctggagcctgggaatgaacaaggctctttggttttcaaatgggatgtttttgtgtctcctccaatgttattatttcttttcagttcttacacaatttgtaacaatgtactgtggttttggagtattctgtcggttacaatatatcgtgtcagcattgtaggagtcgaaaactgaatctaagatcattttggctt

SEQ ID NO: 263 - protein, 787 aa, Triticum aestivum
MTTDQPVISLRPGGGGGGPRGGRLFAPAFAVAASGSGDFLRPHGGGAFRALQDWCLHLSHERVRYSRDQLLDLRKITDVTEQILRLQQEIEAELHGDDQSWVRNDSNVQLQTQTQTQVQAQNRFTETDNRDWRARTEKPPAPAVPEEKSWDNIREVKEQYNASGRQQEQFNRQDQSSSQKAQVGPPPALIKADVPWSARRGNLSEKDRVLKTVKGILNKLTPEKFDLLKGELLDSGITTADILKDVISLIFEKAVFEPTFCPMYAQLCSELNDNLPKFPSEEPGGKEITFKRVLLNNCQEAFEGADSLRVEIASLTGPDQEMEKRDKERIFKLRTLGNIRLIGELLKQKMVPEKIVHHIVKELLGSDKKACPDEEHVEAICQFFNTIGKQLDENPKSRRINDTYFVQIRELVANPQLTPRSKFMVRDLIDLRSNNWVPRRAEIKAKTISEIHTEAEKNLGLRPGATANMRNGRNAPGGPLSPGGFSVNRPGTGGMMPGMPGSRKMPGMPGLDNDNWEVQRSRSMPRGDPLRNQGSLINKVSSINKPSPINPRLLPQGTGALIGKSALLGTGGPPSRPSSITASPTPLPAQTTASPKPSSATPASVPIPDKAASSAKVIPAGLEKKTASLLEEYFGIRILDEAQQCIEELQSPDYHPEIVKEAINLALDKGASFVDPLVKLLEHLYTKKTFKTEDLENGCLLYGSLLEDIGIDLPKAPTQFGEVIARLILSCGLRFEAVEGILKAMEDTFFRKAIFTSVTKTLEADPAGQAILSSHAAVVDACNSLSI

SEQ ID NO: 264 - DNA, 2952 bp, Vitis vinifera
ctcttcggcagaagagagaaaggagtaactcccaatctgctctttctctctctagaaaaaaccaaacatagcatctcgtttctctctctcgaaattccattcttagatttagcgattatctaatcgttgattctgtttctccggtgatcggtgcggggggcgataggctgaaaatagatagtgcgagatcgaggtatgcaggctgatcagacggtgttgagcttgagacctggtggtggcggcggcggcggcggcggagccaatcgaggaagcagattccttggtcctcggttcgattcgtcttcttcttcgccttttggttcatcttctgatcttcctgttctgcgtcctcatggcggtgctccttcctctttctctataaaggctggggatagtcggtttgagggtcgtgagcgtgtgcggttcacccgagacaaactgttgcaacttagggaggttgttgatgtccctgaggatatattgaaaatcaaacaagagatagaagctgaattatttggtgaagatcaaaattggggtcggggagaaagcaatctgccaaatcaatctcagagtcgttattctgagccagataatcgtgactggcgtggccggtctgcacagcttcctgcctctggagaggagaggtcatggtttgactctagacagcaggaagcaaaccaatttaatcgtcaagaccaactaaactcccagtttgcaaaggctcaaatatcttctgtcctagggggacctgctcctgctctagtgaaggctgaggtgccatggtccgctcgacgtgtgaatctttctgagaaggaacgtgtcttgaagacagtgaaagggatactgaacaagctcactccagagaagtttgatcttctcaagggccaattgattgactctgggatcacaacagctgatatcttgaagggagtcatctcgctgatatttgataaggcagtgctagaacccactttttgtcccatgtatgccctcctgtgctctgatcttaatgaaaagcttcccccattcccatctgatgaacctggtggaaaagaaatcacttttaagcgagttctcttgaataactgccaggaggcatttgaaggttctgataaactgagagcagaaataaggcagatgactgcccctgaacaagagttggagcgaagagacaaggaaagaatggttaagcttcgaactttgggaaacatccgtcttattggggagcttctgaaacagaaaatggtacctgaaaagattgtccaccacattgttcaggagcttttaggacatgataataaatcttgtcctgatgaagagaatgttgaggccatatgccagttctttaacactataggtaagcagcttgatgaaagtacaaaatctaggcgcataaatgatatgtactttagccgattgaaggaattaacgacaaacccccaattggctccacgtctgaggttcatggttcgtgatgttcttgatctgcgtgcaaacagttgggttcccaggcgggaagaggtgaaagctaaaaccataacagaaatccatacagaggcagaaaaaaatcttgggttgcgtccaggtgccactgcaagcattagaaatagtcgcaacattgtttctggtgctcaagggaccatgggccctggtggcttcccaatcacccggcctggctctggggggatgatgcctggaatgccaggaaccaggaagatgcctggtatgcctggaattgataacgacaattgggaggttccaaggacccgagccatgcctagaggtgatggatcaggtgttcagactcgtgtccagcagacccatgtccagtcgccattgatgggcaagtcaatgccactgaactcaagactgttacctcagggcagtgctggttttataagtggtaggacaagtgccctattgcagggtagtggtccccctcctgcccgcactgccaactttggcttgggtatggaacctgcactccaaagccctgtgcctgctaaatctgttcctgttgcatctattgttccagcagctgagaaaccagtgactcctgctgccagattgaattcagatgacctccggagaaaaacagtctcacttcttgaggagtactttggtgttcggattttagatgaagcactacagtgcgtggaggaactaaagtccccagcttaccatcccgaagttgtgaaggaggctatttcccttgcactagaaaagagcccaccttgtgttgaccctgttgcgaaactcctggagttcttgttttccaagaaggttcttaccactatggatatagggactggatgtttgatgtacggatcaatgctggatgatattggcattgatttaccaaaagcgccgaatagctttggtgaggttattgggaacctagttttggctggggcattggacttcaaggtagtgacggaaatcatgaagaaagtggaggatgacaggtttcagaaaatgatatttgatgctgtgatgaggattgtcagttccagtccttctgggcaaggggtgttggattcgcaggcagccgacattgcagcttgccagagcctgctctagtaagccttaccctttgtttgcaagagtagatcaatttctgtaaccactgagattggatgttccatgcctatgcctatgcctatgcctattttctctctttccaattgccccttccgtttgcccccttttttaaggcgagcaacttgtatcacaatatgatgataagacggagctgtgaagaacagataaatttttattgagttgtatattttgcccgaggtgatagtagtgtgtttattgaagaaaaaaaatgagaacataacaccatggtttttgctctcaaagtgcagctaattatggtcggtcgagaattggggacccaatggttttgtattggattagtttttttaattttcttgacagagtaattta

SEQ ID NO: 265 - protein, 794 aa, Vitis vinifera
MQADQTVLSLRPGGGGGGGGGANRGSRFLGPRFDSSSSSPFGSSSDLPVLRPHGGAPSSFSIKAGDSRFEGRERVRFTRDKLLQLREVVDVPEDILKIKQEIEAELFGEDQNWGRGESNLPNQSQSRYSEPDNRDWRGRSAQLPASGEERSWFDSRQQEANQFNRQDQLNSQFAKAQISSVLGGPAPALVKAEVPWSARRVNLSEKERVLKTVKGILNKLTPEKFDLLKGQLIDSGITTADILKGVISLIFDKAVLEPTFCPMYALLCSDLNEKLPPFPSDEPGGKEITFKRVLLNNCQEAFEGSDKLRAEIRQMTAPEQELERRDKERMVKLRTLGNIRLIGELLKQKMVPEKIVHHIVQELLGHDNKSCPDEENVEAICQFFNTIGKQLDESTKSRRINDMYFSRLKELTTNPQLAPRLRFMVRDVLDLRANSWVPRREEVKAKTITEIHTEAEKNLGLRPGATASIRNSRNIVSGAQGTMGPGGFPITRPGSGGMMPGMPGTRKMPGMPGIDNDNWEVPRTRAMPRGDGSGVQTRVQQTHVQSPLMGKSMPLNSRLLPQGSAGFISGRTSALLQGSGPPPARTANFGLGMEPALQSPVPAKSVPVASIVPAAEKPVTPAARLNSDDLRRKTVSLLEEYFGVRILDEALQCVEELKSPAYHPEVVKEAISLALEKSPPCVDPVAKLLEFLFSKKVLTTMDIGTGCLMYGSMLDDIGIDLPKAPNSFGEVIGNLVLAGALDFKVVTEIMKKVEDDRFQKMIFDAVMRIVSSSPSGQGVLDSQAADIAACQSLL

SEQ ID NO: 266 - DNA, 2652 bp, Vitis vinifera
atgagaaaaaaaaaaaagggaaaattaagggaacaaaagggtttttctcatcttgagggcgcctctctttcgttctctcttcgcagctgcgcagagagaggtgaggtatacacaggttgggagagaaagtccagagaggctgactctcctttctctctatattcgaaccctattcctactctatctctctctatctctctctgtgttctctctctgtgcccactttccgttatctttttctctctacaactcaactcaggattcgcatctcgagttatgcagcaggcagatcagaccgtcataagcttgcgtccaggtggtggtggtggtcctcgcggcaccagattcctcgcctctcgcttcgactcttcctcatcgtcttcatctgatgctcagcctcttcgccctcacggcggtctcgctccatcgtcgttcctcaagagtggagacttgcggtttgaaggtcgtgaacgtgtccggtacacccgagaccagctgttgcaacttagggaggttgttgatatccctgagaatattttgaagattaaacaagagattgagtctgagtttggtggtgaagaccaaaactggaatcgtggagatggcaacgttcaaccccaatcccaaagtcgttatgctgagccagacaaccgtgactggcgtggccgatcttcacagttgcctgccactggagaggatagatcctgggaatcaattcgagacaataaggagttacccagtcgatttgagtcaaggactcaggacttgaataaccgtcaagaccaactaaactcccagtttgtgagggctcaactatcttctaaccaaggggtagggcctgctcctgttcttgtcaaggctgaagtgccatggtctgctcgaagggtgagtctatctgagcaggaacgtgttctgaagacagtgaagggcatactgaacaaattgaccccggagaagtttgatgttctcaaaggtcagctgattgaatctggaataaccacccatgatattttaaagggtgttatctcgcttatttttgataaggctgtgctggagcccacattttgtcccatgtatgctcttctatgctcagaccttaatgagaagctgccgccatttccctctgaagaacctggtgggaaagaaattacctttaagcgaatcctcctgaataattgccaagaggcatttgaaggtgctgacagcctgagggcagaaattgggctgttgactgcccctgagcaagaagtggaacggagggaaaaagaaagaaaagtgaagctccgaactcttggaaacattcgccttattggtgaacttcttaagcagaagatggtgcctgaaaagattgttcaccacattcttcaggagcttttgggacatgatggtaaaacttgcccagctgaggagaatgtggaggctatatgtcaattttttaatactattggaaagcagctggacgagagccaaaaatctcggcgagttaatgatctctacttcagcaggttgaaggagctgacgacaaacccccaacttgcaccacggttgaggttcatggttcgtaatgttcttgatctgcgggcgaacaactgggtccctagacgtgaagaggtgacagctaaaaccatcactgaaattcattcagaggcagagaagaatctagggttgcgtccaggtgcaactgcgagcatgagaaatggtcgtaatacaggggcacttggtggtatgggccctggaggcttccccatttctagacctggttctgggggtatgatgcctggaatgcctgggaccaggaagatgcctggaatgcctgggcttgatactgataactgggaggttcctcgaaaccgttcaatgccaagggctgatggtgttggagcccagtctgccttgcgtgtccagtcagctttaatctccaaaccagggccaatcaattcaaaacttctaccccagggcagtgggggtttcataagtgggaagacaagtgccttattgcagggtagttctgcatcgacatctcaacagccttccagctttgttttgggagttgagcctattagtcaaacccctaagcctgtttctcaggcagcacctgttcgtactcctgagaaaccacaggctgctgcaccaagatcaaatcctgttgatcttcgtagaaaaactgtctcccttctggaggaatatttcagtgttcgaattcttgatgaagcattacagtgtgttgaggagctgaaatctcctgcatatcaccctgaggttgttaaagaagctgttagccttgccctggaaaagagtccaccttgtgtagaaccagtcataaagcttcttgtgtacttgttcaataaaaatgttttgctggctagggatttagggactggatgtctcctctatggctcactgttggatgatgttggcattgatttaccaaaagcaccaaataacttcggtgaggttcttgggaagctggttttggccgggggtttagacttcaaggtggtgaaggaggtcctggagaaggtggaagatgacaggttccaggcagccatctttgatgctgtcatgagcggcattagctcagaccctttggggcaaggattgatggaaaaacatagacttgatatccaggactgcaagagtttgcttggttga

SEQ ID NO: 267 - protein, 791 aa, Vitis vinifera
MQQADQTVISLRPGGGGGPRGTRFLASRFDSSSSSSSDAQPLRPHGGLAPSSFLKSGDLRFEGRERVRYTRDQLLQLREVVDIPENILKIKQEIESEFGGEDQNWNRGDGNVQPQSQSRYAEPDNRDWRGRSSQLPATGEDRSWESIRDNKELPSRFESRTQDLNNRQDQLNSQFVRAQLSSNQGVGPAPVLVKAEVPWSARRVSLSEQERVLKTVKGILNKLTPEKFDVLKGQLIESGITTHDILKGVISLIFDKAVLEPTFCPMYALLCSDLNEKLPPFPSEEPGGKEITFKRILLNNCQEAFEGADSLRAEIGLLTAPEQEVERREKERKVKLRTLGNIRLIGELLKQKMVPEKIVHHILQELLGHDGKTCPAEENVEAICQFFNTIGKQLDESQKSRRVNDLYFSRLKELTTNPQLAPRLRFMVRNVLDLRANNWVPRREEVTAKTITEIHSEAEKNLGLRPGATASMRNGRNTGALGGMGPGGFPISRPGSGGMMPGMPGTRKMPGMPGLDTDNWEVPRNRSMPRADGVGAQSALRVQSALISKPGPINSKLLPQGSGGFISGKTSALLQGSSASTSQQPSSFVLGVEPISQTPKPVSQAAPVRTPEKPQAAAPRSNPVDLRRKTVSLLEEYFSVRILDEALQCVEELKSPAYHPEVVKEAVSLALEKSPPCVEPVIKLLVYLFNKNVLLARDLGTGCLLYGSLLDDVGIDLPKAPNNFGEVLGKLVLAGGLDFKVVKEVLEKVEDDRFQAAIFDAVMSGISSDPLGQGLMEKHRLDIQDCKSLLG

SEQ ID NO: 268 - DNA, 5440 bp, Arabidopsis thaliana
ctataatcatgtccgtccaataaaaccctaattttatctttccttgcgtcgtttcactccattacagagttgtagaatttagcttgccaaaaagtgtgaagattagggtttgttctagatgtcctacaatcaatccagacccgacagaagcgagactcaatatcgtagaactggtcgatccaccggtaaccaacaacaacaacaacaacaccgatcttcttccgccgccggttacggtaagggcgccggcgctcctggttctgcgcctgccccttccacttatcctgataattcttccttgtcttccaatcgcagttttaagaagcccggcaatgctcaaggaggagggcagcctcgggtgaatctgccacctgtgaatcatcctaataatcacaacaatggtcccaatgctcactctcgctctcaaggagaaccgggtgttggtggaccaaccaatccaactgaatcgttcaacagaaacaccggacctattccaaaggctccaacttctcagtctaccgtcatgagttccaagatcaatgagacgcccaacacagctaaagcctctggagacgcttctcaggcatttcctctccagtttgggtcacttggtcctgatttgatggttcctgctcgaactacctcagcacctccgaatatggatgaccagaaacgtgcccagatgcagcaatcttctttaagaacggcgtcaaatgtgccagcttctgtacccaaaaaagattcatcaaataagggtgcagataatcaattgatgaggaaagaggggcacaatccatcgagtgaaaaagctgatatccaagtcccacatatagcccctccaagtcaaacgcagaagtctccaattacaaatattcgcatgccttctgtgcagacaccatatcagcatactcaggtccctcaccctgtacattttggtgggccgaatatgcatatgcagactcccgtgactgcaacctcgtttcagatgccaatgccaatggcattatctatgggaaatactcctcaaatcccgccgcaggtgttttatcagggacatccaccacatccgatgcatcatcagggtatgatgcatcaggctcagggacatggttttgcaactccaatgggtgctcagattcatcctcagttaggccatgtgggtgtgggtttgagccctcagtatccccagcagcaaggtggaaaatatggtggggcacgcaagaccacccctgtaaagattacacatcctgacacacacgaagagctgaggcttgatcgacgtggtgacccgtattcagaaggcgattcaacggctttaaaaccacattctaacccacctcccagatcacagccagtctcatcatttgctccaagaccagtcaatttggtgcaaccctcatataactccaataccatgatatatcccccggtttcggtaccgttaaataatggtccaatgtcatccgctcaggcaccgagatatcattacccagttattgatgggtctcagagagtacaacttatcaaccaacctgctcatactgctccacagcttatcagacccgctgctcctgcacatctttcctctgattcgacttcctctgtgaaagcacgcaatgcccaaaatgtaatgtcatctgctctacctgtaaatgcgaaggtatcagtgaagccagctggggtttctgaaaagcttggatcaccaaaagacaggtcacatggagaagttaacatttctctgtcacaaaagaacgtggaggcatgttcgttgagctcttcccagcagccgaaacctagctttgtctctggagtaccaaattcgtctgctccgccagcaaagtcgcctgtggagactgttccgctagcaaagtcgtctgtggagactgttccgccagtaaagtcgtctgtggagactgctccagttacaacgactgaaatcagaagagcggaaatggtgagtgagtcgatctcagttgaagatcagacatgtaaggtggaaccccctcataatctgactgagaatcgtggacagactatgccagactctctggtctctgatcctgaaacagcaaccgttgctgccaaggaaaatttatcactcccagctaccaacgggtttaggaagcaactcctgaaggtgtctactacatctgatgctccaacttctgactcagtagatacaagtattgacaaatctacggaaggttcaagccatgcctcatcggagatttctggttcttcaccgcaagagaaagacctaaaatgtgataaccggactgcttctgacaagctcgatgaaaggtctgtaatttctgatgcaaaacacgaaacactgtcaggtgtgcttgagaaggcacagaatgaggtagatggtgccacagatgtctgtcctgtctctgaaaaactagctgttacagatgatacgagctctgaccttccacattctactcatgttctgtcttctactgttcctcttggacattcggaaacacataaatctgctgttgaaacaaacacgagaagaaatacttctacaaaaggaaagaagaagataaaagaaatccttcaaaaagcagatgctgcagggacaacttctgatctctatatggcttacaaagggcctgaggaaaagaaagagagctcaaatgttgttcatgatgtttcgaaccagaacctgttacctgccatacctcaggctgttgaagccattgtggatactgaaccagtgaaaaatgaaccagaagactgggaagatgcagccgatgtttctacaccaaagctggaaactgcagataattctgtgaatgcaaagagaggttcctcagatgaggtcagcgacaactgcatcaatacagaaaagaagtactcccgggatttcctcctaaagtttgcagacctgtgtactgctcttcctgagggatttgacgtttcgcctgatattgctaatgccttgattgttgcatatatgggtgcatcacatcatgaacatgattcatatcctactcctggaaaggttatggatcgccaagcaagtggtgctcgtttagatcgccgtcccagcaacgtggctggtgatgatagatggacgaagaatcagggttctcttccagcaggatatgggggtaacgtaggtttccgacctggtcaaggaggaaactcgggagttttaagaaaccctcgtatgcagggaccaattatatctagaccgatgcaacctgtgggtcctatgggaggaatgggtagaaatacccccgacttagaaaggtggcaacgtggttcaaatttccaacaaaaaggactttttccttctccgcacactcctatgcaagtgatgcacaaagccgagagaaaataccaagtggggacaattgcagatgaagaacaagcaaaacaaaggcagttaaagagcatcctgaacaagttgaccccacaaaactttgagaaactgtttgagcaagttaaaagtgtcaacattgacaacgctgttacactttctggtgtcatttcacagatatttgacaaagccttgatggagccaacattctgtgagatgtatgcagatttctgttttcatctctctggggcgttacctgattttaatgagaatggtgaaaagattaccttcaaaagattgcttctcaataaatgtcaggaagaattcgagaggggggagaaagaagaggaggaagccagtagagttgccgaagaaggtcaagtagaacaaaccgaggaggaaagggaagagaaaagacttcaggtgcgaaggagaatgcttggtaacatcagacttattggtgagttatacaagaaaaggatgttgactgagaaaatcatgcacgcatgcatccagaagttgctcgggtataatcaagatccacatgaagagaatattgaagctctgtgtaaactaatgagtacgataggagttatgatcgatcacaacaaagctaagttccagatggatggatattttgagaaaatgaaaatgctatcatgcaaacaagaattgtcttctagggtgaggttcatgttgatcaatgccatcgatctgagaaagaacaaatggcaggagagaatgaaggtcgaagggccgaaaaaaattgaggaagtgcacagagatgctgcacaagaacgccaaactcaagcgaataggctttcacgtggaccctcaatgaattcgtcaggaagaagggggcatatggagtttagtagtcctaggggaggaggaggaatgctatcacctccagctgcccaaatgggtagttaccatggaccacctcaaggtcgtggctttagtaatcaggacattcgatttgatgacaggccatcttatgagcctaggatggttccaatgccgcaaaggtcagtatgtgaggagcctattaccttgggtccgcaaggtggtcttggtcagggaatgtctattagaaggcctgcagtagcatcaaacacttatcagtctgatgctactcaggccggtggtggagattctaggcgaccggccggtggtttgaatggttttggctcacatagacctgcaagtcctgttactcacggacggtcaagtcctcaagagcggggaacagcttatgttcatagggaatttgcaagtctgtcgcgtgcttctgatctgtcaccagaagtttcgtccgctaggcaagtactacaagggccatcagctacagtaaacagtcctcgagaaaatgctttgtctgaagaacagttagagaatctgtcattgtccgcaattaaggaatattacagtgcccgagatgagaatgagattggtatgtgcatgaaagatatgaattcaccagcttaccacccaacaatgatttctctctgggtaactgattcgtttgagagaaaagacaaagaaagggatctcttagcaaagctccttgtgaacctcgtgaaatctgctgacaacgccttaaacgaagtccagctagtgaaagggtttgaatcggttttgaaaaccctggaggatgcagtaaatgatgctccaaaagcagcagagtttcttggtagaatatttgggaaaagtgtgacagagaaagtagtgacattgacagagattggtcggttaatccaggaaggaggagaagaaccaggaagtctgatagagtttggattaggcggcgatgttcttgggagtgttttggagatgataaaaacagaagctggagaagaaacgttggttgagattcgccggagctcaggtctgaggattgaaaatttcaaacctcatgcacctaaccggtctaagatattagagaaatttacttaggaaaaaaaaatggaaccatcttttgggttcctttcttcttctctttttttgtttctctcttaaaagtcttttctcttttcaagtgcttcaaacaaaactaatttgttataaagggagtttctctattttattatatagcaaaaaacttcc

SEQ ID NO: 269 - protein, 1723 aa, Arabidopsis thaliana
MSYNQSRPDRSETQYRRTGRSTGNQQQQQQHRSSSAAGYGKGAGAPGSAPAPSTYPDNSSLSSNRSFKKPGNAQGGGQPRVNLPPVNHPNNHNNGPNAHSRSQGEPGVGGPTNPTESFNRNTGPIPKAPTSQSTVMSSKINETPNTAKASGDASQAFPLQFGSLGPDLMVPARTTSAPPNMDDQKRAQMQQSSLRTASNVPASVPKKDSSNKGADNQLMRKEGHNPSSEKADIQVPHIAPPSQTQKSPITNIRMPSVQTPYQHTQVPHPVHFGGPNMHMQTPVTATSFQMPMPMALSMGNTPQIPPQVFYQGHPPHPMHHQGMMHQAQGHGFATPMGAQIHPQLGHVGVGLSPQYPQQQGGKYGGARKTTPVKITHPDTHEELRLDRRGDPYSEGDSTALKPHSNPPPRSQPVSSFAPRPVNLVQPSYNSNTMIYPPVSVPLNNGPMSSAQAPRYHYPVIDGSQRVQLINQPAHTAPQLIRPAAPAHLSSDSTSSVKARNAQNVMSSALPVNAKVSVKPAGVSEKLGSPKDRSHGEVNISLSQKNVEACSLSSSQQPKPSFVSGVPNSSAPPAKSPVETVPLAKSSVETVPPVKSSVETAPVTTTEIRRAEMVSESISVEDQTCKVEPPHNLTENRGQTMPDSLVSDPETATVAAKENLSLPATNGFRKQLLKVSTTSDAPTSDSVDTSIDKSTEGSSHASSEISGSSPQEKDLKCDNRTASDKLDERSVISDAKHETLSGVLEKAQNEVDGATDVCPVSEKLAVTDDTSSDLPHSTHVLSSTVPLGHSETHKSAVETNTRRNTSTKGKKKIKEILQKADAAGTTSDLYMAYKGPEEKKESSNVVHDVSNQNLLPAIPQAVEAIVDTEPVKNEPEDWEDAADVSTPKLETADNSVNAKRGSSDEVSDNCINTEKKYSRDFLLKFADLCTALPEGFDVSPDIANALIVAYMGASHHEHDSYPTPGKVMDRQASGARLDRRPSNVAGDDRWTKNQGSLPAGYGGNVGFRPGQGGNSGVLRNPRMQGPIISRPMQPVGPMGGMGRNTPDLERWQRGSNFQQKGLFPSPHTPMQVMHKAERKYQVGTIADEEQAKQRQLKSILNKLTPQNFEKLFEQVKSVNIDNAVTLSGVISQIFDKALMEPTFCEMYADFCFHLSGALPDFNENGEKITFKRLLLNKCQEEFERGEKEEEEASRVAEEGQVEQTEEEREEKRLQVRRRMLGNIRLIGELYKKRMLTEKIMHACIQKLLGYNQDPHEENIEALCKLMSTIGVMIDHNKAKFQMDGYFEKMKMLSCKQELSSRVRFMLINAIDLRKNKWQERMKVEGPKKIEEVHRDAAQERQTQANRLSRGPSMNSSGRRGHMEFSSPRGGGGMLSPPAAQMGSYHGPPQGRGFSNQDIRFDDRPSYEPRMVPMPQRSVCEEPITLGPQGGLGQGMSIRRPAVASNTYQSDATQAGGGDSRRPAGGLNGFGSHRPASPVTHGRSSPQERGTAYVHREFASLSRASDLSPEVSSARQVLQGPSATVNSPRENALSEEQLENLSLSAIKEYYSARDENEIGMCMKDMNSPAYHPTMISLWVTDSFERKDKERDLLAKLLVNLVKSADNALNEVQLVKGFESVLKTLEDAVNDAPKAAEFLGRIFGKSVTEKVVTLTEIGRLIQEGGEEPGSLIEFGLGGDVLGSVLEMIKTEAGEETLVEIRRSSGLRIENFKPHAPNRSKILEKFT

SEQ ID NO: 270 - DNA, 4953 bp, Glycine max
atgtccttcaatcaatcgaagtcggagaataacgatgcggtttatcgaaaacccgggcgatcctccagcttcaatcagcagaggggctcctacggcaggggtggcgggaccgcgccgacgagcaattcactctcctctagccggagtttcaacaagaagtctaataatgcacaaggtgggcaatctagggtaaacccccctgggcattcaacagagttcaatagtgcatctactgcccgaaccattaacaatggagcatcagatgggccaggtacaaagtcatctgaatcatcagctgcacatacgagtgctggaattcttccaaaagctccaacttctctacagccccccttgatttctgatccagtccctccctcaagccctgccaagggagatgcgtctaaggcattcccttttcaatttggatccattgctcctggctttgttaatgggatggcaattcctgctcgtacaagttcagcccctcctaatatagatgagcagaagcgtgatcaggctcttcacgactcttacaaatctgtgccttcggtgccaattcctcctgttccaaagcagcaacaaccacctaggaaggatgctggtgtcactgagcaatctaatgctggggacagccgggagactcataatgggggtactaaggcaaaaaaggatcctcaggtatcagctttgacaccggcaagccatatgccaaagccctctgttcctgtaactgggattccaatgccaactccatatcaccagtcacaggctcctttacagtttggcagtgctaatccacagattcaatctcacggtatgtcaacagcatccctccagatgcctataccaatgcctttaccaattggcaatgctacacaggtgcaacgaccagtttttgttccaggtcttcaaccacatccaatgcatcctcggggaatcatgcatcaaggccaaaacatgagttttgctcctcaaatgggtcatcagttgccccatcaattaggcagcatgggcattggcatcggtcctcaatatccccagcagcaaggtggaaaatttgctgctcctcgaaaaactactgtaaagataactcatcctgagacacatgaagagctgaggcttgataaaaggacagatgcatgttcagatggtgggtcatctggtgctaggtcacatcctaacataccttctctatcacctgttaaatcttttccagcttctcatcctgtgaactattattcttccagctcatataataccaattctccctattatccatctagttctattccattaacaagtagcccgatctctcctaattctcagccaccgatatttaattatcctgtgaaccatggtccacaaggtgcaaatttcatgaattcgtcatcacttggttccccacctattagtaaagctagcactccaacaggggttgcatctctggccattaagccaagtgaatcccctagttcaacagcatcttgtgatgctagctcctctgtgctgcaaaaagggtctgaaacttgttcagaaatctccttaccacagtacaagttgtctagtgattctgtcccagttgtggataataatgaaggcgggagggaatctcttagtaggtccaactctttgaaggataagaaaccagggaagaaaggtcaattatcacaccatcaggtttctgtacaatctcccacagcggataatgtgcctttttgtgctgttgaccatggaatatatgataccggagtttccaaacctgtaggaactaaaacaaaccattctgcagaacttaccactgaagatcttccaacatctaatacaatacctagtagcacttctactgctgttgaagtgaaaaccaatgggtctgcagaagttgttgcttgtgtttcagctgaaggatcttgtgcacaaactgttgacagagtgcacaataataatcctgataagatagataaattatttgaaggtgataatttaggcacgtgtactactaccacattgcattattctagagatgtctcttttagcagaaatgatggtgtagttactgatggatttgtttcaggaaaatttggcatatcagatctgcagtctgctgatcttccagaaacaacatcaaagcatgtcaaggatgggtcagagaatactggcgatgagtcaagtaccaaggatagaccaattatagaaccaaataaagcgaaaactacatctaaagggaagaagaaaagaagagagatacttcagaaagcagatgctgctgggtcaacgtctgatctttataatgcatacaagggacctgaggaaaagaaagaagctgtcttaagttctgagagcacagaaagtgctaccaccaccactttgaagcagttgccaaaagatgctgctcagtcagatgctttagcaagtgaaaaatgtagtcacagtaaagctgaactcgatgactgggaggatgctgctgacatgtctacccccaaactggaggttcatgataaatctcaacaagttggtgatggaagtggaagtacagccaaaaagtattcacgtgatttccttctgaaatttgcagatcagtgcactgatcttcctgaaggttttaaagtcaccgcagacattgaagctttgatgagtggcaatattggtagttctcatgtttttgagcgtgattcacatcctagtcctggaagaattgtagatagacccggtgggatgtctcggatggatcgccgtggggatgtggtaatggaggatgacagatggagtagagtttctggtgcttttcgttctggacgtggtttggatggcattggaggtaatgtgggatttcgatctggccaaggagggaattttggtgtcttaaggaactctcgtgcacagacaccaccacaatatgttggagggatcctttctgggccaatgcaatcggtgggaaatcatggtggaagaaataaccctgatggggagaggtggcagcgttctgctagcttccagcagaggggtttaattccttctcctacccaaactcctttacagatgatgcacaaagctgagaataagtatgaagtgggtaaagcatcagatgtggaagaggtaaagcagaggcagttgaaggctatcttgaacaaactaactccgcagaattttgatagactttttgaacaggtgaaagcagttaatattgacaatgcagtcaccctcactggtgtcatctcacaaatctttgagaaggctctgatggaacctaccttttgtgaaatgtatgccaacttctgtttgcatctggcttctgagttgcctgattttagtgaggacaatgaaaagataacttttaaaaggttattattaaacaagtgccaggaggaatttgagaggggtgaaagagaagaagaagcagcaaataaggctgacgagggtgaggttaagcagtctgctgaggaaagggaagaaagaagagttaaggcaagaagacgcatgttgggaaacatcagattgattggagaactatataagaagaaaatgttgacggagaggataatgcatgagtgtatcaagaagttactgggtcagtatcaggatccatatgaagaagacattgaagctttgtgcaagctaatgagtactattggggagatgattgatcatccaaaagccaaggaacatatggatgcatattttgaaaggatgaaattattatcaaacaacatgaatttatcttctagggtgaggttcatgttgaaagattccattgatttgagaaagaataaatggcaacaaaggaggaaagtagaaggtccaaagaagattgaggaggtacacagggatgccgctcaggagaggcaggcccaagctggtaggtcaggtcgtggtcttggcaacaatcaatcagctagacggaatcccatggattttggtccacgaggatcttctatgctgtcttctcccaattctcaaatgggtggactgcgtggtcttcctactcaagttcgtgggtatggtgcttttcaggatgctcgatttgaggaacgacaatcttatgaggctaggaccttggcagttccattgcctcaaagaccctcaggagatgattctataaacttggggccccaaggtggtcttgctaggggaatgtctacgagaggatcaacagcaatttccaatttaccaatatctgatgtgcttcctgtccatggagactctcatagaatgaatacaggtcttaatgggccatctgcttatgatcaatcaagtgctccagagcataatgtaaaccatggcaacagaggcttgaggagtgaagatcggaatcttgaacctcttgctcatttgcaagggtcaatagtctctcagaatgcttcttcagagaagatttggccagaagaacgactgagggacatgtccttgtcagcaataagggaatactacagtgctagagatgagaacgaacttgctttatgtgtcaaagatttgaactctccgagcttccatccttccatggtttctctatgggtcacggattcatttgagagaaaggacgcagaaagagatcttttggccaaactacttgtcaaccttgtgaaatctcagcatggcactttgaatcaagaccagctcatcaaagggtttgaatctgttctcagtacattggaggatgctgttaatgatgcccccagagcagcagagtttcttggccgaatttttgcgatagccataacagagagtgtagttactttgaaggacattgggcagttaatacatgatggtggagaggagccaggtagtctcttagaagttggacttgcagctgatgttctgggaagcacgttggaggtaattcaaagcgagaagggggatgcggttctaaacaagatctgttcaggctctaacttgaggttggaaactttccggccacctaatgctaaaacatcaaggaagttggaaaaatttatttag

SEQ ID NO: 271 - protein, 1650 aa, Glycine max
MSFNQSKSENNDAVYRKPGRSSSFNQQRGSYGRGGGTAPTSNSLSSSRSFNKKSNNAQGGQSRVNPPGHSTEFNSASTARTINNGASDGPGTKSSESSAAHTSAGILPKAPTSLQPPLISDPVPPSSPAKGDASKAFPFQFGSIAPGFVNGMAIPARTSSAPPNIDEQKRDQALHDSYKSVPSVPIPPVPKQQQPPRKDAGVTEQSNAGDSRETHNGGTKAKKDPQVSALTPASHMPKPSVPVTGIPMPTPYHQSQAPLQFGSANPQIQSHGMSTASLQMPIPMPLPIGNATQVQRPVFVPGLQPHPMHPRGIMHQGQNMSFAPQMGHQLPHQLGSMGIGIGPQYPQQQGGKFAAPRKTTVKITHPETHEELRLDKRTDACSDGGSSGARSHPNIPSLSPVKSFPASHPVNYYSSSSYNTNSPYYPSSSIPLTSSPISPNSQPPIFNYPVNHGPQGANFMNSSSLGSPPISKASTPTGVASLAIKPSESPSSTASCDASSSVLQKGSETCSEISLPQYKLSSDSVPVVDNNEGGRESLSRSNSLKDKKPGKKGQLSHHQVSVQSPTADNVPFCAVDHGIYDTGVSKPVGTKTNHSAELTTEDLPTSNTIPSSTSTAVEVKTNGSAEVVACVSAEGSCAQTVDRVHNNNPDKIDKLFEGDNLGTCTTTTLHYSRDVSFSRNDGVVTDGFVSGKFGISDLQSADLPETTSKHVKDGSENTGDESSTKDRPIIEPNKAKTTSKGKKKRREILQKADAAGSTSDLYNAYKGPEEKKEAVLSSESTESATTTTLKQLPKDAAQSDALASEKCSHSKAELDDWEDAADMSTPKLEVHDKSQQVGDGSGSTAKKYSRDFLLKFADQCTDLPEGFKVTADIEALMSGNIGSSHVFERDSHPSPGRIVDRPGGMSRMDRRGDVVMEDDRWSRVSGAFRSGRGLDGIGGNVGFRSGQGGNFGVLRNSRAQTPPQYVGGILSGPMQSVGNHGGRNNPDGERWQRSASFQQRGLIPSPTQTPLQMMHKAENKYEVGKASDVEEVKQRQLKAILNKLTPQNFDRLFEQVKAVNIDNAVTLTGVISQIFEKALMEPTFCEMYANFCLHLASELPDFSEDNEKITFKRLLLNKCQEEFERGEREEEAANKADEGEVKQSAEEREERRVKARRRMLGNIRLIGELYKKKMLTERIMHECIKKLLGQYQDPYEEDIEALCKLMSTIGEMIDHPKAKEHMDAYFERMKLLSNNMNLSSRVRFMLKDSIDLRKNKWQQRRKVEGPKKIEEVHRDAAQERQAQAGRSGRGLGNNQSARRNPMDFGPRGSSMLSSPNSQMGGLRGLPTQVRGYGAFQDARFEERQSYEARTLAVPLPQRPSGDDSINLGPQGGLARGMSTRGSTAISNLPISDVLPVHGDSHRMNTGLNGPSAYDQSSAPEHNVNHGNRGLRSEDRNLEPLAHLQGSIVSQNASSEKIWPEERLRDMSLSAIREYYSARDENELALCVKDLNSPSFHPSMVSLWVTDSFERKDAERDLLAKLLVNLVKSQHGTLNQDQLIKGFESVLSTLEDAVNDAPRAAEFLGRIFAIAITESVVTLKDIGQLIHDGGEEPGSLLEVGLAADVLGSTLEVIQSEKGDAVLNKICSGSNLRLETFRPPNAKTSRKLEKFI

SEQ ID NO: 272 - DNA, 5334 bp, Glycine max
atgtccttcaatcaatcaaagtccgataagagcgacgctgtgtaccgaaaatccgggcgacccggcagcttcaatcagcagcgcggtccctccggcggtgcgtacggcaagggcggcggtggcggcgccgggccttctccgtcgctctcctctaaccggagttttaacaagaagtctaataataatgcacaaggtgggcaatctagggtaaaccctactccggtgaattcgactgagtctaatagtacttatgcagcccggactgtaccaaacggttcccatgtacagccacatattcatggaggatctgatgcaccgattacaaatgcaactgccaagccatctgaatcgttggctgcacagaggagcaccagaactgttccaaaagctcctacttctcaacctcccgccatgagttcttatccagcagctcctacaaccccagctaaggcagatgcatctaaggcattccctttccaatttggatctattagtcctggctttatgaatgggatggcaattcctgctcgcacaagctcagctcctcctaatatagatgagcagaggcgtgagcaagctcgacatgattcttttagacccgcaccctcaatgccaacacctccagttccaaagcagcaggcagtgaagaaggatacaagtgttgctgaccaatctaacactggggagacttatactgggactagggccaaaaaggatactcaagtgtcaccattacccccagcaagccagatgcagaagccttctgtcatttctttatctggaatgtcaatgccaatgccatatcaccagtcacaggcatctgtacactttggtggtcctaatccacagattcagtctcaaggtatgtcatcggcacctcttcagatgccattaccaatgcctttaccgattggaagtgctgcacaagtgcaacaacaggtttttgttccaggccttcaacctcatcctatccatcctcagggaatcatgcatcagggccaaagcatgggtttcaatcctcaaattggccctcagttgccccatcagttaggcaacatgggtattggaattagcccacaatatccaccacagcaaggaggaaaatttgctgctcctcgtaaaactactcctgtcaagataactcaccctgagacacatgaagagctaagacttgataaaaggacagatgcatattcagatggtgggtcatctggtgcaaggcctcattctggcatgccttctcaatctcagcctgcccagcaattcgcagcttcccatcccattaattattatccatccagttcctacagtaccaatcctctcttttatccaactcccagttctcttccattaacaagtagccagataactcctaactctcagccacccagatttaattatgcagtgaaccatggcccgcaaaatgttagttttgtaaattcatcatctcatagttccctgcctgttaataaagctggcacttctattcctggcaatgctgaaccgcctaatccagaattttcctgggatgtgcataatacattcttgtcagctccttcaggagtaacttctgtgtctattaagccaagtggtggatctggtgttgtggactcatcattttccaattccagtaatcaaaagagtggatctcctagttcttcattgacatctggtgatgctttctcttctgtgccactaaaagggtctgaaacaactgaaatctcttcacaacagtctaaggtgtccagtgattcatcagctttgaactcattgccaaatctgtctgctgcatgtactgtgaagcctacatcagcttccttgttacttcctacatctgctgtgagtgaagagtctgtttcagttctgcctaataatgagggcagaaagaaggaatctcttagtaggtcaaattctttgaaggataaccagaagaaaatacacaagaaaggccaatcacagcatcaggttgctgtgcaatctccttctgtggctaatgtgccttcccaagctgttgatggtgatatccctgttggtgaagtttctgaaactgtaggaactaaaacaaaccattctgcggcagttaccagtgaagatctctccgctgcagcttcagacatgttatcagctaccagtgagagcataacttctgctgttgaaacaaaaactaatgattctacacaagtttctgcatgtgcttcagctgaaggacccgttacacaagtggcggataatttgaacaatcataagaatgctgagatagatgaattgttacaacaggataaaccgttacagccagatattttggaaatggttcgtaaaacagaaaatttgtctcttcaaggaagtaaacaaagtgttagtgatggtggaacagaattaaaacaacccaagcaaggtgctgcaaaaaatgatagtgtagttagtaatgaagctgtttcttcaaattctggcacatcagatcagcagtctgctgatctcctagaaacaacttcaaaacagtgcaaggatgatagtgcagagaatgctggcagtggttcagtgtctcttccagcatcaggtaccaaggacaaaccaatttcagagtctagtaaggtgaaacctacatcaaaggggaaaaagaaacgaaaagagattcttcagaaggccgatgctgccgggtcaacatctgatctttataatgcatacaagggacctgaagaaaagaaagaaactgttttaagttcagagaaaacagaaagtggttccacttctgaaaatttagagcagttgccaactgatactgctcagccagatgctgtagctgagcaatctaagcagagtaaagctgaacttgatgattgggaggatgctgctgacatgtctacaccaaaactagaagtttctgatgaaaccggacaggttagtgatggaagtgcaattactgccaaaaagtactctcgagatttccttttgaaatttgcagagcagtgcactgatcttcctggagggtttgaaatcacggcagacatagctgaggctttgatgggtgctaatgttagttctcatgttattgaacattcttctactggaagaattattgataggtcaggtgggatgtctcgtcgtgggagtggtgttattgaggaagacaaatggaataaagtttctaatgcatttcattccggtatgcgattggatggtgttggaggtaatgcaggatttcgacctggccaaggaggcaattttggtgttttaaggaatccacgcacacagacacctctgcagtatgctggtgggattctttctggtccaatgcaatccatggtaaatcagggaggaatgcaaagaaatagccctgatggagaaaggtggcagcgcactaatagcttccagcagaggggtttaattccatctccgtctactcctcaaactcctttacagatgatgcacaaagctgaaaagaaatatgaggtgggtaaagtgacagatgaggaacaggcaaagcagaggcaattgaagggtatattaaacaagttaactcctcagaattttgagaagctttttgatcaggttagagcagttaatattgacaatgtggtcactctcaatggtgtcatctcgcaaatctttgagaaggccttgatggaacctaccttctgtgaaatgtatgccaatttctgttttcatctggcagctgtgttacctgatctcagtcaagacaatgaaaagataactttcaagagattattgttaaacaagtgccaggaagaatttgagaggggggaaagagagcaagaagaagctaataaggctgatgagggtgaggtcaagctgtctaatgaggaaagagaagagaaacgaaccaaggcaagaagacgtatgttggggaatatcagattgattggagaactatataagaagaaaatgttgacagaaaggataatgcatgaatgcatcaagaagttattgggtcagtatcaggatccggatgaagaagatattgaagctttgtgcaagctgatgagtactattggggagatgattgaccatcccaaagccaaggaacatatggatgcatattttgaaatgatgagatcattatcaaacaacatgaatttatcttctaggttgaggttcatgttgaaggatgtcattgatttgagaaagaataaatggcaacaaagaagaaaggttgaaggtccgaagaagattgaggaggtgcacagagatgcttctcaagagaggctggcccaagctagtaggctgggtcgtggtccaggcaacaatccacctcgaagaatccctatggattttggtccaagaggatcatcaatgttatctcctaatgctcagatgggtggactgcgtggattgcctactcaagttcgcgggtatggttctcaggatgctcgcatggaagacaggcaaacttatgaggctaggacattgtcagttcccttgcctcaaagacctttgggtgatgaatcaataaccttgggaccaatgggtggccttgccagaggaatgtccattagaggtccacctgcagtttcaagttcaactgagcgcacttcatacagctctagggaggaccctgcatcaagatatactccagatagatttgctggttcgactgcttacgatcaatctattgttcaagatcgtaatatgaattatggtaacagggacttgagaaatgcaaataggattcttgataaacctgttgtaacttcacctcctgcccgaacacaagggacagcagcctcccagagtatttctccagagcgactgcaggacatgtccatggcagcaatcagagaatactatagtgctagagatgtgaatgaagttgttctatgcatcaaagatctgaactccccaggctttcatccttccatggtttctctctgggtcacagactcatttgagagaaaggacaacgagagagatcttttggcccagctgcttgtcaaggttgtgaaatctcaggatggacccttgggtcaagcccagctcatcaaagggtttgaatctgttctcagtactttggaagatgcggttaacgatgcccccaaagcaccagagtttcttggccgtgtttttgccaaagctataacagagcatgtagtctctttgaaagagattgggcggttaatacatgagggtggagaggaaccggggagcctcttagaagctggacttgcagctgatgttcttggaagcacattggaggtaataaaaatggaaaagggtgatgctgttttgagtgagatctgcacgagctccaacttgcggttggagaccttccggccacccgaacctcttaaatcaaggaagttagagaaatttatttag

SEQ ID NO: 273 - protein, 1777 aa, Glycine max
MSFNQSKSDKSDAVYRKSGRPGSFNQQRGPSGGAYGKGGGGGAGPSPSLSSNRSFNKKSNNNAQGGQSRVNPTPVNSTESNSTYAARTVPNGSHVQPHIHGGSDAPITNATAKPSESLAAQRSTRTVPKAPTSQPPAMSSYPAAPTTPAKADASKAFPFQFGSISPGFMNGMAIPARTSSAPPNIDEQRREQARHDSFRPAPSMPTPPVPKQQAVKKDTSVADQSNTGETYTGTRAKKDTQVSPLPPASQMQKPSVISLSGMSMPMPYHQSQASVHFGGPNPQIQSQGMSSAPLQMPLPMPLPIGSAAQVQQQVFVPGLQPHPIHPQGIMHQGQSMGFNPQIGPQLPHQLGNMGIGISPQYPPQQGGKFAAPRKTTPVKITHPETHEELRLDKRTDAYSDGGSSGARPHSGMPSQSQPAQQFAASHPINYYPSSSYSTNPLFYPTPSSLPLTSSQITPNSQPPRFNYAVNHGPQNVSFVNSSSHSSLPVNKAGTSIPGNAEPPNPEFSWDVHNTFLSAPSGVTSVSIKPSGGSGVVDSSFSNSSNQKSGSPSSSLTSGDAFSSVPLKGSETTEISSQQSKVSSDSSALNSLPNLSAACTVKPTSASLLLPTSAVSEESVSVLPNNEGRKKESLSRSNSLKDNQKKIHKKGQSQHQVAVQSPSVANVPSQAVDGDIPVGEVSETVGTKTNHSAAVTSEDLSAAASDMLSATSESITSAVETKTNDSTQVSACASAEGPVTQVADNLNNHKNAEIDELLQQDKPLQPDILEMVRKTENLSLQGSKQSVSDGGTELKQPKQGAAKNDSVVSNEAVSSNSGTSDQQSADLLETTSKQCKDDSAENAGSGSVSLPASGTKDKPISESSKVKPTSKGKKKRKEILQKADAAGSTSDLYNAYKGPEEKKETVLSSEKTESGSTSENLEQLPTDTAQPDAVAEQSKQSKAELDDWEDAADMSTPKLEVSDETGQVSDGSAITAKKYSRDFLLKFAEQCTDLPGGFEITADIAEALMGANVSSHVIEHSSTGRIIDRSGGMSRRGSGVIEEDKWNKVSNAFHSGMRLDGVGGNAGFRPGQGGNFGVLRNPRTQTPLQYAGGILSGPMQSMVNQGGMQRNSPDGERWQRTNSFQQRGLIPSPSTPQTPLQMMHKAEKKYEVGKVTDEEQAKQRQLKGILNKLTPQNFEKLFDQVRAVNIDNVVTLNGVISQIFEKALMEPTFCEMYANFCFHLAAVLPDLSQDNEKITFKRLLLNKCQEEFERGEREQEEANKADEGEVKLSNEEREEKRTKARRRMLGNIRLIGELYKKKMLTERIMHECIKKLLGQYQDPDEEDIEALCKLMSTIGEMIDHPKAKEHMDAYFEMMRSLSNNMNLSSRLRFMLKDVIDLRKNKWQQRRKVEGPKKIEEVHRDASQERLAQASRLGRGPGNNPPRRIPMDFGPRGSSMLSPNAQMGGLRGLPTQVRGYGSQDARMEDRQTYEARTLSVPLPQRPLGDESITLGPMGGLARGMSIRGPPAVSSSTERTSYSSREDPASRYTPDRFAGSTAYDQSIVQDRNMNYGNRDLRNANRILDKPVVTSPPARTQGTAASQSISPERLQDMSMAAIREYYSARDVNEVVLCIKDLNSPGFHPSMVSLWVTDSFERKDNERDLLAQLLVKVVKSQDGPLGQAQLIKGFESVLSTLEDAVNDAPKAPEFLGRVFAKAITEHVVSLKEIGRLIHEGGEEPGSLLEAGLAADVLGSTLEVIKMEKGDAVLSEICTSSNLRLETFRPPEPLKSRKLEKFI

SEQ ID NO: 274 - DNA, 5250 bp, Medicago truncatula
atgtcctacaatcaatcaaaaacggaaaagaacgacgccttttatcgaaaatctgggcgatcgtctagctttaatcagcagagaggtccctcaggtggtcatggaaggggcagcggtggccaggcaccggcttcgtcacttaactctaataggagttttagcaagaagtctaataatgcacaaggtgggcaatatcgggtgaacccttcacccgtgaattcaactgagccaaacagtacttatgctgctcgaaccatacataacggtactcatgtacaaccccagatgcatggagcatctgatgggccggttgcaaaggcatctgaatcaacagctgcacagaggagccctagagttgctcaaaatgcaccaacctctcaaccgccccctgtgagctccgaaccaaccgttcctacaagccctgcaaagggagatacttcaaaggcattcccttttcagtttggatcgattgttcctggtgttatgaatggggtggctattcctgctcgtacaagctcagctcctcctaatttagatgagcagaagcgtgatcaggctcgtcacgactctattaaacctgttccttcagcgccaatccctactgttccgaagccacagcagccacctaggaatgatgcagttgtaaccgagaaaactaatgccagagatactcatctgggggctaaggctaaaaaggatccccagttgccagctttgactccggcaagccagatgcagaggccttctgctgttcctgtacctgggatgtcaatgccaacaccatttcagcagtcacagcaatctttacagtttggtggtcctaatccacaaattcaatctcagggaatgtcttcgacacccatgcatattcctatgccaatgtctataccaatcggaaatgttggacaagtgcaacagccggtttttattcctggtcttcagcctcatccaatgcactctcatgggatgatgcatccaagccataacttaagtttcgctcatcaaatgggtcatcagttgccccatcaattgggcaacatgggcattggcaccggccctccatacccccagcagcagggtggaaattttgcgggtcctcgaaaaactactactgtcaagataactcaccctgaaacgcatgaagagctaaggcttgataaaagggcagatggatattcagatggtgggtcatctggtgctaggccgcatcctaatgtaccttctcaatcccatcctgttaaatccattgctgcttctcagccttcgaattattatccttccggctcatatagttccagtcctccctattatcaacctcctggttctcttccgttaacaagtagccagataactcccaacacccagccaccgatatttaattatcctgtgaacaatggtccacaaaatttagctttcatcaattcatcttctcttagttctctgcctgttaataaagtcagcactcctattcctcacattgctgaagctcccactgcagaacgttctcgtgaagtgcctaaagtgacatcatcagcttcaacgggggtttctgtgactattaaaccaagtgctgtttctgctgttaccgactcatcattgactaattctagtatttctggtgttcaaaatcccgatacctcctcggaaatctctacacagcattctaaatcttccgaggattcttcaatttcgagtttgccaaaacaatctgctgcatctgttgtcactgatgagaagcttacagtgctacctacgccagctgtgactgtggactctgtttcagttgtgactaataatgaagccaacacgagggaacctgttagtaggtccaactctgcgaaggataaccagaagaaatctgggaaaataggtcaatcgtctcaagatcaggtttctgtgcaatctcctacagcggctagtatgcagtctcgagctgttgacagtagtatatctgatactggggtttccacacctgtaggaagtgaaacaaaccattttcctgcaattatcactgaagatcttctcacatctgaaggatctgttgctgaagtggctgatagtttgagtgatcataagcatgataagatagacgaatcatccgaaggaaaaatatcaacaagtacccaacgagtactgggtacaggtacaagacgaattttggagtacctatgcttcagagcttttaaaacaatacagaaaggacaggatgaatctgctagttttaagtcagatgacaggacagatgatagctcaggcataccaacctatactgcattggattctagtgatgtctatttagcatcagatctgcagtctgctgatttaccagaagcaaacaaggaaaccaatgatagtgcggagaatgcatgcagtgactcgatgtcccattcagtgtcgggtaccaaggatagaccaaatttagaaccaaataaggcgaaaactacatctaaagggaagaagaaaagaaaagagtttctccagaaagcagatgctgctgggacaacttctgatctttataatgcatataaaggacctgaggaaaagaaagaaactggcttaatttcagagagctcagaaagtgaatgtacatctgaaggtttaaagcagttatccgcagattctgctcagttagatgctgcagtaagcgagaaaagtggtcagaataaagccgaacctgatgactgggaggatgcagctgacgtgtctacaccaaagcttgaagttgatgataaatctcagcaggattttgatggaagtggaagtacagaaaaaaagtactcgcgtgattttcttttgaaattctcagagcaatgcattactcttcctgaaggttttgaaattacggcagacatagctgcggctttgatgaattccaatgttggtaattctcgtgattcacatcctagtcctggaagaactgtagacaggtcaaggatggaacaccgtgggaatgttgtggccgaggaagacaaatggaacaaagtttccaatgcttttcattctgggcgtggtttggatggtagcggtggatttcgacatggccaaggaggcaattttggtgttttaaggaatcctcgtggaccggcacccatccaatatggtggggcgatcctttctgggccaatgcaatctggggcacatcagggtggaatgcaaagaaatagtcctgacggggagaggtggcaacgttctactagcttccagcagaggggtttaattccttctcctcagtctcccttacagatgatgcacaaggctgagaagaagtacgaaatagggaaagtgtcagatgcagaagaggcaaagcagaggcaactgaaagctatcctgaacaaactaactcctcaaaatttcgatagactttttgaacaggtaaaagcagttaatattgacaacgcaatcactctcactggtgtcatctcacaaatcttcgagaaggctctgatggaacctaccttctgtgaaatgtatgccaacttctgctcacatctggctgctgagttgcctgatttgagtgtggacaacgaaaagataacttttaagaggttattattaaacaaatgccaggaggaatttgagaggggtgaaagagaacaagaagaggcaaataaggtggatgaggctgagggtgaggtcaagctgtcaaatgaagaaagggagcagagaagaaccaaggcaagaaggcgcatgttaggaaacatcagattgattggagaactttataagaagaaaatgttgacagagaggataatgcacgagtgcataaagaagttactaggtcagtgtcaggatcctgatgaggaagatgttgaggctctgtgcaagctgatgagtactattggggagatgattgaccatcccaaagctaaagaacatatggatgtatattttgaaaggttgaaaatattatcaaacaacatgaatttatcttctagggtaagatttatgttgaaggatgtaattgatttgagaaggaatagatggcaagtaaggagaaaagttgatggtccaaagaagattgaggaggtacacagagatgccgtgcaagaaaggcaggctcaagcacaagttggtaggacgggtcgtggtatgggaaacaatcaatctgcaagaaggaaccccatggattttggtcctagaggatcacctatgttgtctcctccttctccaatgggtggaccgcgtgggctttctactcaaacacgtggatatggtttacaagatgctcgttttgaagaaaggcaatcttatgagcctaggaccttgccaattaattttcctcaaagacccttgggtaatgaatctataacattgggaccccaaggtggtcttgctaggggaatgtccagtagaggaccgacaaattcaaatatgtcaatacctgatgtgcattctggccctggagactctcacagaatgcctagcggtattaatggttatggcaatttatctgaacgcacatcgtatggcaatagggaggatcttgcatcaagatatatgtcagacagaccttcaagtccagctggatatgatcattcaagtgctgcatctcataatataaactatggtaacagagacttaaggaatgatgatcggaatctaaataggcctgttgcaacttcacctcatgctcagccgcaagggccaattgtctctcaaaatgcttctacagatgaacaactacgggacatgtccttgtcagcaatcagagaatactacagtgctagagatgtaaacgaagttgctcaatgcatcaaagatctgaactctccaaactttcatccttctatggtttctctctgggtcacagactcatttgagagaaaggacgctgaaagagatcttttggctaaactgcttgtcaagcttgggaagtctcaggatggcctcctgagtccaactcagcttatcgaagggttcgagacagttctcagtacattggaggatgctgttaatgatgcccccaaggcaccggagtttcttggccgtatttttgcagaacttataacagagagtttagtcggtttgaacgagattgggcagttagtacatgatggtggagaggagccaggcagtctcctagaatttggacttgcagctgatgttcttggaagcacattggaggcaataaagcacgagaaaggggatgttgttctaagtgagattcgtacaagctcaaccttgcggttggagtctttccgaccacctaataattctactacatcaaggaagttggagcaatttatttag

SEQ ID NO: 275 - protein, 1749 aa, Medicago truncatula
MSYNQSKTEKNDAFYRKSGRSSSFNQQRGPSGGHGRGSGGQAPASSLNSNRSFSKKSNNAQGGQYRVNPSPVNSTEPNSTYAARTIHNGTHVQPQMHGASDGPVAKASESTAAQRSPRVAQNAPTSQPPPVSSEPTVPTSPAKGDTSKAFPFQFGSIVPGVMNGVAIPARTSSAPPNLDEQKRDQARHDSIKPVPSAPIPTVPKPQQPPRNDAVVTEKTNARDTHLGAKAKKDPQLPALTPASQMQRPSAVPVPGMSMPTPFQQSQQSLQFGGPNPQIQSQGMSSTPMHIPMPMSIPIGNVGQVQQPVFIPGLQPHPMHSHGMMHPSHNLSFAHQMGHQLPHQLGNMGIGTGPPYPQQQGGNFAGPRKTTTVKITHPETHEELRLDKRADGYSDGGSSGARPHPNVPSQSHPVKSIAASQPSNYYPSGSYSSSPPYYQPPGSLPLTSSQITPNTQPPIFNYPVNNGPQNLAFINSSSLSSLPVNKVSTPIPHIAEAPTAERSREVPKVTSSASTGVSVTIKPSAVSAVTDSSLTNSSISGVQNPDTSSEISTQHSKSSEDSSISSLPKQSAASVVTDEKLTVLPTPAVTVDSVSVVTNNEANTREPVSRSNSAKDNQKKSGKIGQSSQDQVSVQSPTAASMQSRAVDSSISDTGVSTPVGSETNHFPAIITEDLLTSEGSVAEVADSLSDHKHDKIDESSEGKISTSTQRVLGTGTRRILEYLCFRAFKTIQKGQDESASFKSDDRTDDSSGIPTYTALDSSDVYLASDLQSADLPEANKETNDSAENACSDSMSHSVSGTKDRPNLEPNKAKTTSKGKKKRKEFLQKADAAGTTSDLYNAYKGPEEKKETGLISESSESECTSEGLKQLSADSAQLDAAVSEKSGQNKAEPDDWEDAADVSTPKLEVDDKSQQDFDGSGSTEKKYSRDFLLKFSEQCITLPEGFEITADIAAALMNSNVGNSRDSHPSPGRTVDRSRMEHRGNVVAEEDKWNKVSNAFHSGRGLDGSGGFRHGQGGNFGVLRNPRGPAPIQYGGAILSGPMQSGAHQGGMQRNSPDGERWQRSTSFQQRGLIPSPQSPLQMMHKAEKKYEIGKVSDAEEAKQRQLKAILNKLTPQNFDRLFEQVKAVNIDNAITLTGVISQIFEKALMEPTFCEMYANFCSHLAAELPDLSVDNEKITFKRLLLNKCQEEFERGEREQEEANKVDEAEGEVKLSNEEREQRRTKARRRMLGNIRLIGELYKKKMLTERIMHECIKKLLGQCQDPDEEDVEALCKLMSTIGEMIDHPKAKEHMDVYFERLKILSNNMNLSSRVRFMLKDVIDLRRNRWQVRRKVDGPKKIEEVHRDAVQERQAQAQVGRTGRGMGNNQSARRNPMDFGPRGSPMLSPPSPMGGPRGLSTQTRGYGLQDARFEERQSYEPRTLPINFPQRPLGNESITLGPQGGLARGMSSRGPTNSNMSIPDVHSGPGDSHRMPSGINGYGNLSERTSYGNREDLASRYMSDRPSSPAGYDHSSAASHNINYGNRDLRNDDRNLNRPVATSPHAQPQGPIVSQNASTDEQLRDMSLSAIREYYSARDVNEVAQCIKDLNSPNFHPSMVSLWVTDSFERKDAERDLLAKLLVKLGKSQDGLLSPTQLIEGFETVLSTLEDAVNDAPKAPEFLGRIFAELITESLVGLNEIGQLVHDGGEEPGSLLEFGLAADVLGSTLEAIKHEKGDVVLSEIRTSSTLRLESFRPPNNSTTSRKLEQFI

SEQ ID NO: 276 - DNA, 6047 bp, Oryza sativa
ggcttcgcccccactcttcactcccctccccacccccacccatcaatttcttcgtccgtctcgtgttaagccgcccctccactggcgacaaccaaaccctaggccgccgccgccccgggaggccaccagggggaggaaaaaggaagaggaggagatcggaagtgggagagggatttatgtcccagcgaggggacaggggcgaggggcacgcgaggagacccggccggtccagcagcttcggcggcggccaccgcggaggcggaggagtcggcggcgcgggcaagggcggcgggggctcctccggccagcctcccctcgcaactaaccgcagcttcaggaagtccggcaatggccatggcgggcaccagagggctgtgagccaacccgacacgcacggcttccagcctgcacctgccccgaccgctctgcagacgccgccgctgcgcccgccggcacctcagaatgcgccggcgcatgtccctgttcccgcaccacgtcctcagcaccatgatccgtctggagcgcgagcacccaccctaccaccttccagcgagaacacggccaatgcgccaccactgaaaggtattcctcatgccgctccaagggcaccatcaaggatttcaagcacgtccacttcacaaggagcaccaaaaggtggagcatataatcttcagtttggcagtttcccaatgaatggtggaactggtggtagcacaatgcaattccctgccaggacaagctcagctcctcctaatttggatgagcaaaaacgcatgcaggccctccctgaaggtcataaggttgtaccttctgggcttgttccacaagctccaaaacatcagcagcaacagcagccgttgcagcagcagaagcaacagccgcagtcacagccaccactgcagcaaacaagaaaggatgttgttagttctaatcattcatcgaaacctatcaaccctcacattccttcccaagttaagagctctgtgcatgtctcaccatccgtgcccaatgttgcaccaccaagaccccctgttcagcagatacctgggatgcccatgtcaatgccatttcaccaccaggcacccttgcagtttggcggtcacaacccacaaattccaccacagggagttgtgcccagttcactacaaatgtctatgggattgcatggcgccaacgcaccccaggttgcacagcaaatgtacatccctaccattcagcaccatcatcaactgcaaccgccaacaatgatgcatcaagcagcaggtataccttatggtccagctgctcatcaactcactcagatgagtggtatgatgaatgtgggggtggcacctcagtttactccacaacagccaaataagtatgttacaggcccaactcggaagaccacagtcaaaattactcatccagatactcatgaagaattgaagctcgataagaggatggactcttctgggcaaaggggtttacctagtgtacaacaacaatcccagccggtcagtacttatggatctcctatgggcttctaccagcaaaattcgtataaccagtcaactatgttttaccccacaacctctggtgtcggtcaggttcccactgtatcacagggtcctaggtttgtatccacacaaacagtttcatacatcagcccatcgatgaacacaggtcctggcagtaacaaggacaacctagcagggtctacaacatctggacactcccaagtcacaggcaaaccacacccagctggtttgcacatggagaaatccggggtacaaacggtcacgataagtgcgccgcctggtaaatcagatgtgaacaagttaaaaccagctgaagatgttgtatcacatcgacaaaaggataatgaagctgtttctggggtccgtaaatcaggtgaaaatgagagcaaagcttcaccgatcacggagaagcatcccacaccagtgagccaacccttacaagctctagctgcaaatccagaaactacagcagctgcatcttttgttgtgaattctgttcctggagatgatggaaaaagcaaagaatctattcaaagaactggatcatttaaggatagcaataagaacgccactaaggacaccaggaatttatcacaagaaccacagtcagcttcatctgctgaagatttaaaggtgcatacttctgtaaaggatgtatgttgtggtgttagtctcatggaatccaagggtgtgaataaagagtctgaacagaccaatgcagcttccgcttcaccgactgaaatgttaaaagctgctgatgcttctagcattgataggagctctgcaagatcgacctctgagagcactgagaatgttcaagaagtaggaaaatctgatgttgctattggtgattctgagaaaagtggaataactaacaaagtttcaccagatcttacaaaggatgatatttcttctggttcaactgggaatgaatcacatgaagtttgcacgctagatttggcggagcaattacctgtgggagcttctaatcctgataatttagatactgcaacttctgtaactgaccagggacagcttctcaaagaacccagctcatcagtatctgatgagaatgttattatggacagatcgcatcagagtgctgaaaaaatgtcagatttggttgatgacactgttgcttctgttgccagttctgaaactttgccagaatctataattcaaaatgccaatgctaaaggtaacacaagtggtaatcaggaaacagggtctgctacatctagcaatattcttaatgtgttgccggtacctcattcagtggcatcagaggatccactgaaaccagaaagtatgttaaaggatcaatcgagtagtgcaccagcagcctctgctcgaccagtttcaagggaaaaacctagcgtggaaattaccagaacaaagtttacagctgtgaaaaagaagaaaagaagagaaatgctttcaaaagctgatgctgccgggagctcagatctttataatgcatacaagggacctgaggaaaaagtagatttcattggtgcctcagagagtcttgatagttcttcaattgctgatcatgagctaccagacgagtcctccgaaaaggaggttaatatgggtgaggacgagggaaagaaaaaggttaagcttgatgattgggaagacgctgcagaaatgtctactccaaagttggagaggtctgattccagcaatcaaacaaccgaagctaatgggaggaagagatattcacgcgattttttgctaactttagcacagagttgtactaatcttcctgttggtttccagatgattgagtacgccagcgttctgttccctaatttggccggaaagtcttatgttgttgatcacccaagtcctggaaggggagctgacaggccagcatctcgtggtgatcgccgtggtgttgtcattgaggatgatagatggggaaagtcgggccatctttttggttctggtcgtgatatgtccatggacaatggccctccaactatgaatcaccgtggtgctccaggagttatgaggaatccacgaggtgggcttattaatgtaggaccggttgcacctcaaatgtctcgaagtggctctgatgcagatagatggcagcagaagggtatattcccatctcctgttacacccatgcaagtaatgcacaaagcagagaaaaaatatgtcgttggcaaagtttctgacgaggaagaagctaagcagaggcaactgaaggcaatacttaacaaattgacgccacagaattttgaaaagctttttgaaaaagttaaagaggtgaacattgacaatgtggcaactcttactggggtcatttcacagatatttgacaaagctttgatggaaccaacattctgtgaaatgtacgctaatttttgtttccatttggctggtgcactgccagattttagtgaggataatgaaaaaattacattcaagagattgcttttgaacaaatgtcaggaggaatttgagaggggtgaaagagaagaagctgaagcagacaaaactgaggaggaaggtgagattaagcaaactaaagaggaaagggaagagaaaagaatccgtgctcgaaggcgcatgcttgggaacattaggttgattggggaattgtacaaaaagaggatgttgacagaacgcatcatgcatgaatgcattaaaagattgctgggaaattatcagaaccctgatgaagagaacattgaagcactgtgcaaattgatgagcacaattggagagatgatagaccatgcaaaggctaaggagcatatggatgcgtactttgatataatgctgaagctttcaacaagtcagcaattatcttcccgtgttaggttcatgctgagagattcaattgatctcaggaaaaataaatggcagcaaaggcgtaaggtggaaggcccaaagaaaattgatgaggtgcacagggatgcagctcaggaacgacatgctcagtcgagtaggttagctcgtggctcagttgttggttctggtccaaggcgaggagctgcacctatggattatggtcctcgtggctcagcagcagcattggcttctccaagttctcagcaagttggccatagaggaatgccttcgcattcccgagggtttggtacccaagatatccggtttgaagaaaggagtcctttggaccatagaacaactgtccttcctccgcgtaaggatgaagccatcactcttgggccacaaggtggcctagcaaggggtatgtctataagagggcagccactgatatcaaatgctgagctttcttctgctgatagtcgcaggatggtatctggtcccaacgggtataattctgcttcaactgcaagagaggaacctggctcgagaattcctgatcgctctggaagaatagcaccaaatacacagtttgctggaccatcgaacaggcctgccagccaagagggccgttcagggaataaattatactctgaggatgatttaagagagaaatctatttccgccatccgggaatattacagtgcaaaagatgagaaagaggttgctttgtgtattgaggagttgaatgctccaagtttctatccctctgtcgtatcactgtgggtaaatgattcttttgagaggaaagatatggaaagagagttgttgacaaagcttttcgttagtctttgcaacagtcgaaataatttattgagcaagtctcatctcactgcaggacttgcgactgtccttggttcattggaagatgctctaagtgatgctccaagagctgcagagtatcttggacggcttcttgcaaggtttgtggtagaaagcatattgtccttgcaggaggtgggtacattgattgaaaaaggtggagaagaacctggagagcttgtacatcatggcattggagctgatgtccttggtgcagttctagagtcgatcaaagtagaaaagggggattcattcttgaatgaggccaaggcaagctccaacctcaagttggaggattttagaccacagcatctcaagagatcgaagttggatgccttcatgaaagcataaagaagctttgttactagcttaccgattcatgggtgttggcaccatggagtttttggcatcagaccagccttttttttattgacaactggaaaggcccatcagatgctgcccctacttggcatgcacccattaattcttccaggagctcatgctgtgtgaattttcttcatcctgttcagagttggttctgatggtaaattatggaattgtcctcgatgtttgttgccaatagttagtcccatttcgagtcggccgtagcgagtatcagggttatttttttgtgatcacaggggggagaagtctttctaaccaatgtttgttgggagtagggagaattctaggttcacagcttgatgcctcccgtggcttctgaccaatatttcattgtgataagactttgtagttgcttataacttatcggcattttcctgatagccaaatgtttcacatgactcacctaccactgccttttgtttaaatcttgctgtacgt

SEQ ID NO: 277 - protein, 1792 aa, Oryza sativa
MSQRGDRGEGHARRPGRSSSFGGGHRGGGGVGGAGKGGGGSSGQPPLATNRSFRKSGNGHGGHQRAVSQPDTHGFQPAPAPTALQTPPLRPPAPQNAPAHVPVPAPRPQHHDPSGARAPTLPPSSENTANAPPLKGIPHAAPRAPSRISSTSTSQGAPKGGAYNLQFGSFPMNGGTGGSTMQFPARTSSAPPNLDEQKRMQALPEGHKVVPSGLVPQAPKHQQQQQPLQQQKQQPQSQPPLQQTRKDVVSSNHSSKPINPHIPSQVKSSVHVSPSVPNVAPPRPPVQQIPGMPMSMPFHHQAPLQFGGHNPQIPPQGVVPSSLQMSMGLHGANAPQVAQQMYIPTIQHHHQLQPPTMMHQAAGIPYGPAAHQLTQMSGMMNVGVAPQFTPQQPNKYVTGPTRKTTVKITHPDTHEELKLDKRMDSSGQRGLPSVQQQSQPVSTYGSPMGFYQQNSYNQSTMFYPTTSGVGQVPTVSQGPRFVSTQTVSYISPSMNTGPGSNKDNLAGSTTSGHSQVTGKPHPAGLHMEKSGVQTVTISAPPGKSDVNKLKPAEDVVSHRQKDNEAVSGVRKSGENESKASPITEKHPTPVSQPLQALAANPETTAAASFVVNSVPGDDGKSKESIQRTGSFKDSNKNATKDTRNLSQEPQSASSAEDLKVHTSVKDVCCGVSLMESKGVNKESEQTNAASASPTEMLKAADASSIDRSSARSTSESTENVQEVGKSDVAIGDSEKSGITNKVSPDLTKDDISSGSTGNESHEVCTLDLAEQLPVGASNPDNLDTATSVTDQGQLLKEPSSSVSDENVIMDRSHQSAEKMSDLVDDTVASVASSETLPESIIQNANAKGNTSGNQETGSATSSNILNVLPVPHSVASEDPLKPESMLKDQSSSAPAASARPVSREKPSVEITRTKFTAVKKKKRREMLSKADAAGSSDLYNAYKGPEEKVDFIGASESLDSSSIADHELPDESSEKEVNMGEDEGKKKVKLDDWEDAAEMSTPKLERSDSSNQTTEANGRKRYSRDFLLTLAQSCTNLPVGFQMIEYASVLFPNLAGKSYVVDHPSPGRGADRPASRGDRRGVVIEDDRWGKSGHLFGSGRDMSMDNGPPTMNHRGAPGVMRNPRGGLINVGPVAPQMSRSGSDADRWQQKGIFPSPVTPMQVMHKAEKKYVVGKVSDEEEAKQRQLKAILNKLTPQNFEKLFEKVKEVNIDNVATLTGVISQIFDKALMEPTFCEMYANFCFHLAGALPDFSEDNEKITFKRLLLNKCQEEFERGEREEAEADKTEEEGEIKQTKEEREEKRIRARRRMLGNIRLIGELYKKRMLTERIMHECIKRLLGNYQNPDEENIEALCKLMSTIGEMIDHAKAKEHMDAYFDIMLKLSTSQQLSSRVRFMLRDSIDLRKNKWQQRRKVEGPKKIDEVHRDAAQERHAQSSRLARGSVVGSGPRRGAAPMDYGPRGSAAALASPSSQQVGHRGMPSHSRGFGTQDIRFEERSPLDHRTTVLPPRKDEAITLGPQGGLARGMSIRGQPLISNAELSSADSRRMVSGPNGYNSASTAREEPGSRIPDRSGRIAPNTQFAGPSNRPASQEGRSGNKLYSEDDLREKSISAIREYYSAKDEKEVALCIEELNAPSFYPSVVSLWVNDSFERKDMERELLTKLFVSLCNSRNNLLSKSHLTAGLATVLGSLEDALSDAPRAAEYLGRLLARFVVESILSLQEVGTLIEKGGEEPGELVHHGIGADVLGAVLESIKVEKGDSFLNEAKASSNLKLEDFRPQHLKRSKLDAFMKA

SEQ ID NO: 278 - DNA, 5807 bp, Populus trichocarpa
tgcagagaaattattgaaaaagaagaatatatgtcctacaatcaatcaaggagtggcagcgataagagcgagttacaatataggaaatcagggcgatccatcagctctaatcagctacggacttcctctcaatcctacggtaagggcggtggtggcggcggcggcggccccccagtcccttcaccgtcttcttcttctctttcctccaatcgcagtttcaataagaagtctagttatgttccacaaggaggagggcaatctagtagggtaaatgtggcacctgttgtgaattcttccgattccggtaataatgctgcttctacaatccgtaatgtacagaatggtgccgcggcgcaacccccattacatggaacatctgatgctccgccgcctgcaagcagtgttaccaagccgacagaaacaccagctactcagaggagtgcccgagctgttccaaaggctccaacttctcaacctgccaccataagttcggagagtggagcacccactacacctgccaaggccccagtagatgcatctaaggcgtttgcgtttcaatttgggtccattagtcctggctttatgaacgggatgcaggttcctgctcgaacaagctcagctcccccaaatttggatgagcagaaacgtgaccaggcacgccaagatacatttaggcctgctccttcattaccgactcctgctccgaagcagcaatttcagaagaaggaagtgagcgcaacagaacaaactatctctgggggggttcatccgcttcccaaggccaaaaaggagacacaagtctcacctgcaccatctgcgagccactcacagaagcattctgttcttccggttactatgacttctatgcaaatgcaatatctgcagccacaggtctctgtgcagtttggtggccgaggcccacaaattcagtcccagggtgtcccaccaacttctcttcagatgccaattccagtgccattgcagatgggcagtgctcctcaagtgcaacagccagtgtttattcaaggtatccaacatcatcctatgcagcctcagggaatgatgcgtcaagggcaaaacttgagttttacgaccacaatgggtcctcagatgcctcctcagttaggcagcttaggaatgaacattgcctcacaatattctcaacaacagggtggtaaatttggtggtcagcgtaaaacatctgtcaagattactgatccaaagacacatgaagagctgaggcttgataaacggacagatccatatccagacactggaccatcaggtctaaggtctcatctcaatgctccccagtcccagccaattccatcatttacaccttcacgtccaattaactattatcctagttcttacaatacaaataatttattttttcaaactccaagctctctaccattaactggtggccaaatagcaccaaattctcagccaccacctaggtttaattatccagttagccaggggccccaaaatgttccatataccaatgcatctgctcttaattctcttccagctagtaagtctgggattgcaattcacggtgttgccgaactgcataaatcagaacatgccagtgatgcacctaatgcaatctcctcaactccatctggagtagtacaagtgaccattaaaccacctgttggttctattggagagaaagttgtggagccatctttgccaaagatctctcctgtcgaaaagggcggatcccacaaatcctcaaggtcatctggggaagctagcccatctccttctcaaagagattcagagacttcatcagaaagctctttacggcaggcaaaacctgttggtgaatcgctggtcaagtcacctccagtggcagcaaaacagcttgcagaggttgctgttgatggtgcagcatctactttgccagctcagtctgtggaggcaataccaggtgtatctaatgctgaagaccaaaaaaaggaagctccgagtattcagaagaaaccaggcaagaaaggaaatattgagcctcagcatcagattggtggacagactaccttgtccacaagcttgtcttctcgcactgtggaacttggtgtattttatggcagtggagtttctgaaactgcagaaactaatacagctccttccccatcaccagcaaacagtgaagctttgacaaaatcaatcaaggaaccagtgtcaacaatttctgctttgaatcctgatgtttctgaaatgaaggttgagaatgctggagatggttttaacactgtttcagctctgggtcttgttgctggagttgctaaaaccccacacaccactccacaagctatgctggatggttcctcctcacaggaagaactacaatgtgaaattccaaccgcagaagagaaaggacagaaatcactgtctgaatgtcttaaacaagattacagtatgtctccagcaccagttaattcaaaatttgcagacattgtcaagcaagataaagaggtatctgatttgacagggacatctgttggcaatgaggtcccagcctcagaaactggacaggagggtctggtggaacctgtgactcgccacgcagcaaatgacagggtatcagatagtgtggatgtctctgcatccagaaatttggattctgccgatgatagaaagccttcagatgcatctttgaggcacggtgatggcataggtaataaagaagcctctgttacaaaatcaagtgtatcaggtcagcaggaatctcttccagtacctgatctttctgaggcaactgcaaaacacaaagggcaatgtgcggaaaaccccggcagtggaacagtcccccatgcaatatctagttccaaagaaaaacccactgagccgactttatcaaagagtacctctggtaaatttaagaagaagagaagagaatttcttctgaaagcagatcttgctgggactacttctgatctttatggggcatataaaggccctgaggaaaagaaagaaaatgtcatatcttcagaagtcacagaaagcaccagccctattctgaatcagacacctgctgatgccctgcaggttgactctgtagcaagcgagaaaaataaagccgagccagatgattgggaagatgctgctgacatgtctacaccgaaactggatagtgatggggaactatcatgtggaggattgggacaacatgattcagatgggaatgcaaatacagccaaaaaatattccagagatttcctccttaaattttctgagcaattttctaatcttcctgaaggttttgtaattacatctgatatagcagaggctttgagtgtcaacgtttctcatcctgctgatcttgattcttaccccagtcctgcaagagttatggacaggtctaatagtggatctcgaataggacgtgggagtggcatggttgatgatggccgatggagtaaacagcctggtccatttggtccgggaagggatttgcacttggatatgggttatggacctaatgccagttttcgacctgttgcaggaggcaaccatggtgttctgaggaacccgcgagcacagagtcctggacagtatgcaggagggattctatctggacccgtacaatcaacgggtctgcagggagggatgcaaagaggtggctcagatgctgacaaatggcagcgttctgttagttctgtgtataaaggattgattccttctcctcatactccattacagacgatgcacaaagctgagagaaagtatgaagtgggtaaagtggcagatgaagaagcagccaagcaaagacagttgaaaggcatattgaacaagttaactcctcagaatttcgagaagctttttgagcaagtaaaagctgttaacattgacaatgctgtgacacttaacggcgttatctcacagatctttgacaaagctttaatggagcccacattctgtgaaatgtatgctaatttctgctttcatctagcagcagagttgcctgaactcattgaagatgatgaaaaggtgactttcaagaggttacttctgaacaagtgccaggaggaatttgagagaggggagcgagagcaagaggaagctaataaagctgatgaagagggtgagattaaaaagtctgatgaggaaagagaagaacagagaatcaaggcacggagacgaatgcttggtaacataagactaattggtgagctctataaaaaaagaatgttgactgaaagaataatgcatgagtgcatcaaaaagttgctgggccaatatcagaatcccgacgaggaggatgttgagtctctttgtaaactaatgagcactattggagagatgattgaccatcccaaagctaaggtgcatatggatgcatattttgacatgatggcaaaattatcaaacaacatgaaactctcatctagggttagatttatgttgaaggatgcaattgatttgaggaaaaacaaatggcagcagaggaggaaggttgaagggccgaaaaagatcgaggaagtgcacagagatgctgctcaagaacgacagctgcaaactagtaggctggctcgcaatcctggcatgaattcttctccaagaaggggccctatggattttggtccgagagggtcaacaatgttatcttctccaaatgctcatatgggtggtttccgagggtttccttctcaggttcgtgggcatggcaaccaggatgttcggcatgaggacagacaatcttacgaggctaggactgtgtctgttcccttacctcaaagacctcttggtgatgattctattactctgggtccacaaggtggtcttgcaagaggaatgtccattagaggaacacctgctattacagttgctcctgtatctgagatttctccaagcccaagtgactcgagaagaatggcagctggtttgaatggtgttagtgccattttagaacgatcaaattatagcccaagggaagatctcattccaagatattctcctgacagatttgcagttccacctactcatgatcaaatgagtggtcaggaacggaatatgaattatgttaacagggacctgaggaatctagatcatggttttgataggccgttgggatcatcatcactaacaaatacacaagggccatcttttgcccagagtattccaacaggaaagatgtggcctgaagaacaactgcgagaaatgtccatggtcacaataaaagaattttacagtgccagagatgagaaagaagttgctctatgcataaaagatttgaattccccaagtttccacccttcaatgatctctctctgggtcacagactcatttgaaaggaaggacatggatagagatcttttggctaagcttcttgccagtcttacaagatcccaggattgcattttggattcaaatcagctcgtcaaagggtttgaatcagttctgactaccttggaggatgctgtaactgatgcccccaaagcaccagaatttcttggacgcatcttgggcagagttgttgtagaaaatgttgttccactaaaagagattgggcggttattgcatgaaggcggagaggagccgggtagccttcttaagtttgggcttgcaggggacgttcttggaagtgttttggagatgatcaaagcagagaacggacaaggtgtcttaaatgagattcgcaacgcctccaatttgcgtttcgaagatttccggcctccacatcctaacagatcaaggatactagagaagtttatttagatagcgatgctcattgtatctttttaggaaaaaaaaagattaaaaaaaaacatgtctagtgcttctaggttactagtcaa

SEQ ID NO: 279 - protein, 1898 aa, Populus trichocarpa
MSYNQSRSGSDKSELQYRKSGRSISSNQLRTSSQSYGKGGGGGGGGPPVPSPSSSSLSSNRSFNKKSSYVPQGGGQSSRVNVAPVVNSSDSGNNAASTIRNVQNGAAAQPPLHGTSDAPPPASSVTKPTETPATQRSARAVPKAPTSQPATISSESGAPTTPAKAPVDASKAFAFQFGSISPGFMNGMQVPARTSSAPPNLDEQKRDQARQDTFRPAPSLPTPAPKQQFQKKEVSATEQTISGGVHPLPKAKKETQVSPAPSASHSQKHSVLPVTMTSMQMQYLQPQVSVQFGGRGPQIQSQGVPPTSLQMPIPVPLQMGSAPQVQQPVFIQGIQHHPMQPQGMMRQGQNLSFTTTMGPQMPPQLGSLGMNIASQYSQQQGGKFGGQRKTSVKITDPKTHEELRLDKRTDPYPDTGPSGLRSHLNAPQSQPIPSFTPSRPINYYPSSYNTNNLFFQTPSSLPLTGGQIAPNSQPPPRFNYPVSQGPQNVPYTNASALNSLPASKSGIAIHGVAELHKSEHASDAPNAISSTPSGVVQVTIKPPVGSIGEKVVEPSLPKISPVEKGGSHKSSRSSGEASPSPSQRDSETSSESSLRQAKPVGESLVKSPPVAAKQLAEVAVDGAASTLPAQSVEAIPGVSNAEDQKKEAPSIQKKPGKKGNIEPQHQIGGQTTLSTSLSSRTVELGVFYGSGVSETAETNTAPSPSPANSEALTKSIKEPVSTISALNPDVSEMKVENAGDGFNTVSALGLVAGVAKTPHTTPQAMLDGSSSQEELQCEIPTAEEKGQKSLSECLKQDYSMSPAPVNSKFADIVKQDKEVSDLTGTSVGNEVPASETGQEGLVEPVTRHAANDRVSDSVDVSASRNLDSADDRKPSDASLRHGDGIGNKEASVTKSSVSGQQESLPVPDLSEATAKHKGQCAENPGSGTVPHAISSSKEKPTEPTLSKSTSGKFKKKRREFLLKADLAGTTSDLYGAYKGPEEKKENVISSEVTESTSPILNQTPADALQVDSVASEKNKAEPDDWEDAADMSTPKLDSDGELSCGGLGQHDSDGNANTAKKYSRDFLLKFSEQFSNLPEGFVITSDIAEALSVNVSHPADLDSYPSPARVMDRSNSGSRIGRGSGMVDDGRWSKQPGPFGPGRDLHLDMGYGPNASFRPVAGGNHGVLRNPRAQSPGQYAGGILSGPVQSTGLQGGMQRGGSDADKWQRSVSSVYKGLIPSPHTPLQTMHKAERKYEVGKVADEEAAKQRQLKGILNKLTPQNFEKLFEQVKAVNIDNAVTLNGVISQIFDKALMEPTFCEMYANFCFHLAAELPELIEDDEKVTFKRLLLNKCQEEFERGEREQEEANKADEEGEIKKSDEEREEQRIKARRRMLGNIRLIGELYKKRMLTERIMHECIKKLLGQYQNPDEEDVESLCKLMSTIGEMIDHPKAKVHMDAYFDMMAKLSNNMKLSSRVRFMLKDAIDLRKNKWQQRRKVEGPKKIEEVHRDAAQERQLQTSRLARNPGMNSSPRRGPMDFGPRGSTMLSSPNAHMGGFRGFPSQVRGHGNQDVRHEDRQSYEARTVSVPLPQRPLGDDSITLGPQGGLARGMSIRGTPAITVAPVSEISPSPSDSRRMAAGLNGVSAILERSNYSPREDLIPRYSPDRFAVPPTHDQMSGQERNMNYVNRDLRNLDHGFDRPLGSSSLTNTQGPSFAQSIPTGKMWPEEQLREMSMVTIKEFYSARDEKEVALCIKDLNSPSFHPSMISLWVTDSFERKDMDRDLLAKLLASLTRSQDCILDSNQLVKGFESVLTTLEDAVTDAPKAPEFLGRILGRVVVENVVPLKEIGRLLHEGGEEPGSLLKFGLAGDVLGSVLEMIKAENGQGVLNEIRNASNLRFEDFRPPHPNRSRILEKFI

SEQ ID NO: 280 - DNA, 5801 bp, Populus trichocarpa
ttgcagataatttattgaaaataagaatatatgtcctacaatcaatcaaggggtggcagtgataagagcgatttacaatataggaaaccaggacgatccgttagctctagtcagcaacggacttcctctgtttctcacggtaagggcggtggcccccccgtcccttcaccgtcttcttcttctctttcttccaatcgcagttttaataagaagcctagtaatcttacgcaaggaggagggcaatctagtagggtaaatttgccttctggtgtgaattcttctgattccggtaataatgctgcttctacaatccgtaatgtgcagaatggtgtcctgacgcaacaccaatcacatggaacatctgatgcaagcagtgttgccaagccgacagaagcatcggctgctcagagaagcacccgagatgttccaaaggctccaacttctcaacctgccgccataagttcggagagtggagctcacatgacacctgccaaggcccccttagattcatctaaggcatttgcttttcaatttgggtccattagtcctggatttatgaatgggatgcaggttcctgctcgaacaagctctgcgccccctaatttggacgagcagaaacgtgaccaggcacatcatgatacatttaggcctgctccttcattaccgactcctgctcctaagcagcaattgcccaggaaggaagttagttcatcagtccaaactagcactggagaggttcatttagttcccaaggccagcaaggagacacaactcccacctgcaccatctgtgagccagacacagaagccttctgttcttccgattcctatgaattctttgcagatgaaatatcagcagccaccagtctcggttcagtttcgtggtccaagcccacaaatccagtctcagggtgtcccagcaaattcacttcatgttccaatacaattacctatggggaatgctcctcaagtgcaacagtcggtgtttattcaaggtctccaacaccatcctatgcagcctcaaggaatgatgcatcagagccaaaccatgagttttacgaatccaatgggtcctcagatacctcagttaggcagcttagcatacggcatgacctcccaatattccgcacagcagggtggtaaatttggcagtccacataaaacgcctgtcaagattactgatccaaagacacatgaagagctgaggcttgataagcgaacagatgcatatccagatgctggatcatcaggactgaggtctcatctcaatgttccccagacccagccaattccatcatttgcaccttctcgtccaattaactattatcctagttcctacaatgccagtaatttatttttcccagctccaagctctctaccattaactggtagtcaaatagctcctaattctcagctaccacctaggtttaactatccagttagccagcccccccaaaatgcaccatatatgaatgcatctgctcttaattcgcttccacttagtaagtctgggacagtatctcatggtgttgcagaaccacagaactcagaacatgctcgtgatgctcgtaatgcaatctccttgactccatctggggcggtgcaagtgactgttaaaccagctgttggctctcatggagagaaagttgtggagccatcttttccaaagatctcctctattgttgaaaagggtggattcttcaaatcctcaaggtcatctggggaagctagcccatctcactctcaaagggattcagaggcttcttcagaaagctctttacagcggataaaatctggtggtgaatcattggtgaagccactgccagtggcagctaaacagcctgcagcagttgctgttgacggtgcagcttctgcttcactagctcagtgtgaggaggcaataccaagtgtatctaatgctgagggccgaaaaaaggaagctctgagtgggtcaaactttatcaaggaacatcagaagaaaccaggcaagaaaggaaatatccagcctcagcatcagattggtggacagacaaccttgtcttctcacactttggaacatggtgtatcttctggcactggggtttctgaaactgcagaaaatgagaaaagtcctccatcattagcaaacagtgaagttttgacaaaatcaatcaaggaaccagtgtcaacgattgctgcctggaatcctgatgtttctgaaaccaaggttgacaatgctggagatgctttcgacagtgtttcatctcaagttcctgttgctggtattgctcataccacacacatttctcctcatgctaagctggatgattcttcacagctggaaaaactaaaatgtgaaattccagcaacagaagacgaaatagagaaatctctgtctgaatgtcctaaacaagattacaacatttcttcagcatcaattaactcaaaatctgcagaccaggtcaagcaagataaagaggtatctgattcagtggtcacatctgttggcaatgaggttccagcctcagaaactgcccaggaggggctggtagaacccgtgacttgccacactgcaaatgaccacatatcagataatgcgggtgcttccacatccagaaagttcaattctgcagatgacataaagcctttggatgcatctttgagtcacagtgataacataggtaataaagaagcttctgttaccaaatctggtatttctggtcatcagggttctccaccagtgcctgatctctccgaggcaactgcaaaacatgaaggggaaggtgcagaaaatgctggtagtggaacagtcccccttgaagtttctggttacaaagaaaagccttctgaattgactagatcaaagagtaccgctaatagaatgaagaagaagaaaaaagaatttcttctgaaagcagatcttgctgggacgacttctgatctttatggggcatacaaaggccctgaggagaagaaagaaaatgtcatctcttcagaagtcatagaaagcactagccctaatctgaagcaggcacctgctgatgcccttcaggttcagactgtagcgagtgagaaaagcatgcagaataaagctgagccagatgattgggaagatgccacagacatgtctacactgaaattggaaagtttaattgatggggaactatcacttggaggattgggacaacatgatacagatgggaatgccaacaaattaaaaaaatattccagagatttcctccttaaattttctgagcaatgtactgatcttcctggaggttttcaaattccatctgatatagcaggctccttgatgggtgtcggtgtttctcatcttgctgatcgtgatccatgccccagtcctgcaagggttatggacaggtctaatagtggatctcgaatagaccgccgtgggagtggtatagttgatgatggccgatggagtaaacagcctggtccatccggtcctggaagggatttacacttggatatcagttatggagctaatgtaggttttcgacctgttgcaggaggcaactatggtgctctgaggaatccacgagcacagagtcctgtacattatggaggagggattttatccggacccatgcaatcaatgggtccacagggagggctgcaaagaggtggcttagatgctgacagatggcagcgtgctgctatttttgtccataaaggatcattttcttctcctcagactccattacagactatgcacaaagctgagaaaaagtatgaagtgggtaaagtgacagatgaagaagcagccaagcaaagacaactgaaaggcatattgaacaagctaacacctcagaattttgagaagctttttgagcaagtaaaagctgttaacattgacaatgttgtcacacttaatggcgttatctcacagatctttgacaaagccttaatggagcctactttctgtgaaatgtatgctaatttttgctttcatctagcagcagagttgcccgaactcactgaagataatgaaaaggtaactttcaagaggatacttctgaacaagtgtcaggaagaatttgagagaggggagcgagagcaagaagaagctaataaagctgatgaagagggtgagattaaacagtctgaagaagaaagagaagaaaagagaatcaaggctcgtagacgaatgcttggtaacataagacttattggagagctgtataaaaaaagaatgttgactgaaagaataatgcacgagtgcatcaaaaagttgctgggtcagtatcagaatcccgatgaggaagatcttgaggctctttgcaaactaatgagcacgattggagagatgattgaccatcccaaagccaaggagcatatggatgtatattttgacatgatggcaaaattatcgaacaacatgaaactctcatctagggttaggtttatgttgaaggattctattgatctgaggaaaaacaaatggcagcagaggaggaaggttgaggggccgaaaaagattgaggaagtgcatagagatgctgctcaagaacgacagctgcaaactagtaggctggctcgcaatcctggcatcaatccttctccaagaagggggcctatggattttggtccaagagggtcaacaatgttgccttctctgaatgcacagatggggggttttcgagggtttcccactcaagttcgtgggcatggcactcaggatgttcggtttgaggaaaaacagtcttacgaggctaggactatgtctgttcccttacctcaaagaccccttggtgatgattctattactttgggtccccaaggtggacttgcaagaggaatgtccattagaggacaacctgccagtatgggtactcttgtagctgatatttctccaagcccaggtgacccaagaagaatggcagctggtttgaatggttctagtgccatttcaggacggtcaaattacagcccaagggaagatatcattccaagatatactccagacagatttgcagttccacctgcttgtgatcaaatgaatggtcaggaacgaaatatgaattatgttaacagggatctgaggaatctagatcatggttttgataggcctcttggatcatcaccaccaacaagagcacaaggaccacctttttcccagaccactccaacaggaaagctgtggcctgaagaacgactgcgagatatgtccacggctgcaataaaagagttttacagtgccagagacgagaaagaagtttctctatgcattaaagaattgaattccccaagtttccatccttcaatgatctctatctgggttacagactcatttgagaggaaggacttggagagagatcttttggccaagcttcttgtcagccttgcaagatctcaaaatggcatattggattcaaaccagctcatcaaagggtttgaatccatcctgactactttggaggatgctgtaaatgatgcccccaaagcaccagaatttctcggacgcatcattggcagggttgttgtagaaaatgttgtccctctatcagagattgggccgttattacatgaaggcggagaggaaccgggcagccttctcaagttggggcttgcaggggatgttcttggcagtattttggagatgatcaaagtggagaaaggagaagctgtcttaaatgagattcgtggtgcctccaatttgcgtttggaagatttccggcctccagaccctaacagatcaaggatactagaaaagtttatttagatgatagtgatgctcattgtatctttttagaaaaaaaaatcatgtcttgtgcttctaggtttacttattaattttcaaaa

SEQ ID NO: 281 - protein, 1896 aa, Populus trichocarpa
MSYNQSRGGSDKSDLQYRKPGRSVSSSQQRTSSVSHGKGGGPPVPSPSSSSLSSNRSFNKKPSNLTQGGGQSSRVNLPSGVNSSDSGNNAASTIRNVQNGVLTQHQSHGTSDASSVAKPTEASAAQRSTRDVPKAPTSQPAAISSESGAHMTPAKAPLDSSKAFAFQFGSISPGFMNGMQVPARTSSAPPNLDEQKRDQAHHDTFRPAPSLPTPAPKQQLPRKEVSSSVQTSTGEVHLVPKASKETQLPPAPSVSQTQKPSVLPIPMNSLQMKYQQPPVSVQFRGPSPQIQSQGVPANSLHVPIQLPMGNAPQVQQSVFIQGLQHHPMQPQGMMHQSQTMSFTNPMGPQIPQLGSLAYGMTSQYSAQQGGKFGSPHKTPVKITDPKTHEELRLDKRTDAYPDAGSSGLRSHLNVPQTQPIPSFAPSRPINYYPSSYNASNLFFPAPSSLPLTGSQIAPNSQLPPRFNYPVSQPPQNAPYMNASALNSLPLSKSGTVSHGVAEPQNSEHARDARNAISLTPSGAVQVTVKPAVGSHGEKVVEPSFPKISSIVEKGGFFKSSRSSGEASPSHSQRDSEASSESSLQRIKSGGESLVKPLPVAAKQPAAVAVDGAASASLAQCEEAIPSVSNAEGRKKEALSGSNFIKEHQKKPGKKGNIQPQHQIGGQTTLSSHTLEHGVSSGTGVSETAENEKSPPSLANSEVLTKSIKEPVSTIAAWNPDVSETKVDNAGDAFDSVSSQVPVAGIAHTTHISPHAKLDDSSQLEKLKCEIPATEDEIEKSLSECPKQDYNISSASINSKSADQVKQDKEVSDSVVTSVGNEVPASETAQEGLVEPVTCHTANDHISDNAGASTSRKFNSADDIKPLDASLSHSDNIGNKEASVTKSGISGHQGSPPVPDLSEATAKHEGEGAENAGSGTVPLEVSGYKEKPSELTRSKSTANRMKKKKKEFLLKADLAGTTSDLYGAYKGPEEKKENVISSEVIESTSPNLKQAPADALQVQTVASEKSMQNKAEPDDWEDATDMSTLKLESLIDGELSLGGLGQHDTDGNANKLKKYSRDFLLKFSEQCTDLPGGFQIPSDIAGSLMGVGVSHLADRDPCPSPARVMDRSNSGSRIDRRGSGIVDDGRWSKQPGPSGPGRDLHLDISYGANVGFRPVAGGNYGALRNPRAQSPVHYGGGILSGPMQSMGPQGGLQRGGLDADRWQRAAIFVHKGSFSSPQTPLQTMHKAEKKYEVGKVTDEEAAKQRQLKGILNKLTPQNFEKLFEQVKAVNIDNVVTLNGVISQIFDKALMEPTFCEMYANFCFHLAAELPELTEDNEKVTFKRILLNKCQEEFERGEREQEEANKADEEGEIKQSEEEREEKRIKARRRMLGNIRLIGELYKKRMLTERIMHECIKKLLGQYQNPDEEDLEALCKLMSTIGEMIDHPKAKEHMDVYFDMMAKLSNNMKLSSRVRFMLKDSIDLRKNKWQQRRKVEGPKKIEEVHRDAAQERQLQTSRLARNPGINPSPRRGPMDFGPRGSTMLPSLNAQMGGFRGFPTQVRGHGTQDVRFEEKQSYEARTMSVPLPQRPLGDDSITLGPQGGLARGMSIRGQPASMGTLVADISPSPGDPRRMAAGLNGSSAISGRSNYSPREDIIPRYTPDRFAVPPACDQMNGQERNMNYVNRDLRNLDHGFDRPLGSSPPTRAQGPPFSQTTPTGKLWPEERLRDMSTAAIKEFYSARDEKEVSLCIKELNSPSFHPSMISIWVTDSFERKDLERDLLAKLLVSLARSQNGILDSNQLIKGFESILTTLEDAVNDAPKAPEFLGRIIGRVVVENVVPLSEIGPLLHEGGEEPGSLLKLGLAGDVLGSILEMIKVEKGEAVLNEIRGASNLRLEDFRPPDPNRSRILEKFI

SEQ ID NO: 282 - DNA, 5711 bp, Vitis vinifera
ggtttaagaggtttgagctttctttagttctacaatttgaacaactatcaaacaaagttcatattagaattctcaattttaatgggcttttttatgccacaatacatcaatgagttcacggctattataggtcatgatctagttaatactagttcgaggtgggtctataccttggatggctcttaatcttgaagcagacttttgttattgtgtgccccactaaaaaaaaatgtcatgttttcttatttggcaaatcaatgatatgacaattgtccctttctcataagaagcatttgttataggttgtttgacatttttactaaatattatacttcatcaggatgatggcttaattaggaaagacaaggtgagcattagtgggacaagttcggatcccttaaagcatgatgcaagaagtgtggaattttattatttgcttctaatttcaataaatatttcctaattgtgtaatctggctaacattgagttctaaggtgatcttaccaagtcttgcatacttgatagctttacacaagtgttatcattctctattttacttgtgaatcctattgcatgttataacatagtataaactagtctctccctttacaagatgccttagaacatttatttattaaactttcgctataaatccaataggtgaaatggacttggcctaacaatcaaacaagtttgttgcattctttttttgcaatttgttatgttttttttttctaaaaaagttataattctatttatcttttttgggtccataaatccaggttttgtgaatggaatgcagatacctgctcgaactagttcagctccccctaatttggatgagcagaagcgggaccaggcacgccatgatacttttatagctgtgcctacattgccgcttccttccaatcctaagcagcacttgccaaggaagggcgtgattgctagtgagcaatctaatgctggggaggctcatcccctttctaagggtaaaagggatgtccaagtatcatctgcatctcctgctaaccaaacacagaagccttctgtccttcctatgactgggatttctatgcaaataccgtatcaccagccacaggtttctgtacaatttagtggtccaaacccacaactacagtctcaaggcatgacagctacttcattgcaaatgcctatgccaatgccattacagatggggaatgcttcccaagtgcagcagcaggtatttgttccaggtctacagccccatcccttgcaacctcagggaatgattcatcagggccagggcttgagttttacaactccaatggggcctcaactatcccctcagttgggaaacttgcaaatggggatgactccgcaatatacacaacaacagcctgggaaatttggtggccctcgcaaaactactgtcaagattactcatcctgatacacatgaggagctgaggcttgataaacgggctgatccatatttggatggcgggtcgtcaggtccatcaggcccaaggtcccatcctaatttgcctcctccctcccaatctattccatcatttacacccccacatccaatcaacttctataccaattcctacaatgccagttccctcttctttccttctccaagttcgcttccccttacaagcaccccattaacttccagcactcaaacaccaaggtttaactatcctgttagccaaggtccaccaactggaccattcataaatgcgcctactcataactccttgtctgttagtaagactgggacggcaatgcagggtgttgccgaaccattgaacttggaacatgcccgtgatgttcataatgtaatgtcttctgtgccatcatccacatcacaggttacaataaaaccggctgttgtctctgttgtagaaaaggttgaatcacctaaacttttaaggctgcctggtgaaactagctcatttcatctgccaaggaatactgacatcaattcagaaacctctttacaacaaccaaaaactgatcttgaaccctcaacatccacattgttaccaggggcaagcaagcaattttctgtggccacagatactgtttctgtggagagctcagcatccaatactttgtcctctgctccaagtgtcctttctgatgaaaatgcatcagttgtgaccagcaatgaaggcagaagaagagaaacccttggcaggtcaaactcgattaaggagcatcagaagaagactggaaagaaaggacatccccaaccacaacagcagtctgatttttctttgcaaaatgaattatcaaaatattcaactgtggcaatagaaggacaaggagaaagtgaattgcctgaagggttcaaacaagatgcccattgtttagagaagtcatcagaatcaatttcctctatatctctagaagctgttaaacaacctgtaccagattctgagttgaaggtaacaacaagcagcattgaggttggattagtggaaactgcacaggaggtggatgtttctgtcagttgttgcacagaaattgataggacaactgaaaattcagtggcacctactcccacaactttggaatccataaatgttgaaactgttccatccaatgctgtattacccactagttcttatgaatcaactgtaaaacctgaaggggcaggtgtggaaaatggtagtggtgggttggtttcccatcctgtatcaagttccaaggataaacccactgtagaactaaataggcccaagactacggttaaaaaaaagaagaggaaagaaattcttcagaaagctgatgctgctgggacaacctctgatctttatatggcatacaagggtccagaggagaagaaagaaactatcatctcttcagaaagcacttctgctggtaatgtaaaacaggtcagtgctgatgctggtcaggaagatgttgtaggaagtgatataggtgagcagcctaaagctgagccagatgattgggaagatgcagctgacatctccacaccgaaattggaaactcaagacaatggtgtcgctaatggaggatcaatgcttgatgacaaagatggaaacggggttttgggcaaaaagtattccagagatttcctgctgacatttgcagaccaatgtaatgatcttccggagggttttgaaattacatctgatatagctgaggcactgatgatttctaatattaatatgtctcatcttattgatcgtgactcatacccaagtcctggaagaattgtggataggcaggcagggggttctcgaccagatcgccgtgggagtggtgtggtggatgatgacaaatggagtaaacttcctgggcctttctcttctggacgagatctgcgaccagatattggttatgggggtaatgtggtaggctttcgatctgtccaaggaggaaactatggtgtgttaaggaacccacgtgggcagtcgactatgcagtatgttggaggaatcctctctggaccaatgcaatcaatgggttctcagggagggcaacggaatagtcctgatgctgatagatggcagcgtgctactggcttccagaagggtttaattccttctcctcaaacttcggtacagatgcacagagctgagaagaagtatgaagtgggtaaagcgacagatgaggaagaggtaaaacaaaggaagttgaaagctatcctgaacaagctgactcctcagaactttgaaaagctttttgagcaagtaaaagcagttaatattgacaatgcagacactctcactcgtgtcatctcacagatctttgacaaagctttaatggaacctactttctgtgaaatgtatgctaacttctgttttcatctggcgagagagctgcccgacttcagtgaagacaatgaaaagatcactttcaaaagattgcttctcaacaagtgtcaggaggaatttgagagaggggaaagagaacaagaagaagctaatagagctgatgaggagggtgagattaaacagtctgaagaggaaagggaggagaagagaatcaaagcacgaagaaggatgttgggcaacattagattgattggggaattgtacaagaagaggatgttgaccgagaggataatgcatgagtgcatcaagaagttgttagggcagtatcagaatcctgatgaggaagatatagaatctttgtgcaaactgatgagcacaattggagagatgattgatcatcccaaagccaaggagcatatggatgtatactttgataggatggcgaagttatcgaacaacatgaaactatcttctagggtaaggttcatgttgaaggatgcaattgatttgcgaaaaaataaatggcaacaaagaagaaaagttgaagggccgaagaagattgaggaagtgcacagggatgcagctcaagaaagacaggctcaagctagtaggctatctcgtggtccaagcatgaattcatcaacaagaaggggggcccctcctatggactttggtccaagaggttcaactatgttatcatctccaaattcccaaatgggtggtttccggggtttgccatctcctcaggttcgtgggtttggtgctcaggatgttcgattagaggatagacaatcttatgaaagcaggactccatcagttccattgcctcatagatccattggtgatgattctattactcttggtcctcagggtggtcttgctaggggaatgtccattagagggccaccagctatgtctagtggtcctttgggtgatatttctcctggttcaggagactctagaaggttgacagccggtttgaatggttatagttctagatttgatcgtggctttgatcgatctcttgccacctctccacctgcacgggcacacggaccagctgtctcacaaaatgtatggcccgaggaacgtttacgtgacatgtccatagcagcaattaaagaattttacagtgccaaagatgagaatgaagttgctttgtgcatcaaagatctaaattccccaggcttctacccatctatggtgtctatttgggttacagactcttttgagaggaaagacaaagaaatggacatgctggctaagcttcttgtcaatctaacaaaatctcgggatgccatgttaagtcaagttcaactaatcaaaggatttgaagctgtactgactgctttggaggatgctgtaaatgatgccccaaaagcagcagaatttcttggtcgcatctttgccatggttatcatagagaatgtgattcccttaagggagttagggcagataatacttgaaggtggagaagagcctggtcggctgcgagaaatcgggcttgcggctgaagttctggggagcacattggagattatcaaatcagagaaaggggagaatgtgttgaacgagattcgcaaagtgtccaatttgcggttggatgacttccggcctcctgatccttcttacagatcagcaaaattagataaatttatttaggggatagtgatgctcatttgtatcttaggagaagaaattcttggctagtggcgttagggtacttgccccctctcctcctaatcttgcagggatgatatttttcttgtcttttcttttataggtgggggtgctttttatatatgggtttgtcttttttctttttttctgtttttgagtattatttcttcccaaagtataactgcaaattgccgaaaaggtacaattgagcatccaaaattttaacatcccttctctg

SEQ ID NO: 283 - protein, 1577 aa, Vitis vinifera
MFFFSKKVIILFIFFGSINPGFVNGMQIPARTSSAPPNLDEQKRDQARHDTFIAVPTLPLPSNPKQHLPRKGVIASEQSNAGEAHPLSKGKRDVQVSSASPANQTQKPSVLPMTGISMQIPYHQPQVSVQFSGPNPQLQSQGMTATSLQMPMPMPLQMGNASQVQQQVFVPGLQPHPLQPQGMIHQGQGLSFTTPMGPQLSPQLGNLQMGMTPQYTQQQPGKFGGPRKTTVKITHPDTHEELRLDKRADPYLDGGSSGPSGPRSHPNLPPPSQSIPSFTPPHPINFYTNSYNASSLFFPSPSSLPLTSTPLTSSTQTPRFNYPVSQGPPTGPFINAPTHNSLSVSKTGTAMQGVAEPLNLEHARDVHNVMSSVPSSTSQVTIKPAVVSVVEKVESPKLLRLPGETSSFHLPRNTDINSETSLQQPKTDLEPSTSTLLPGASKQFSVATDTVSVESSASNTLSSAPSVLSDENASVVTSNEGRRRETLGRSNSIKEHQKKTGKKGHPQPQQQSDFSLQNELSKYSTVAIEGQGESELPEGFKQDAHCLEKSSESISSISLEAVKQPVPDSELKVTTSSIEVGLVETAQEVDVSVSCCTEIDRTTENSVAPTPTTLESINVETVPSNAVLPTSSYESTVKPEGAGVENGSGGLVSHPVSSSKDKPTVELNRPKTTVKKKKRKEILQKADAAGTTSDLYMAYKGPEEKKETIISSESTSAGNVKQVSADAGQEDVVGSDIGEQPKAEPDDWEDAADISTPKLETQDNGVANGGSMLDDKDGNGVLGKKYSRDFLLTFADQCNDLPEGFEITSDIAEALMISNINMSHLIDRDSYPSPGRIVDRQAGGSRPDRRGSGVVDDDKWSKLPGPFSSGRDLRPDIGYGGNVVGFRSVQGGNYGVLRNPRGQSTMQYVGGILSGPMQSMGSQGGQRNSPDADRWQRATGFQKGLIPSPQTSVQMHRAEKKYEVGKATDEEEVKQRKLKAILNKLTPQNFEKLFEQVKAVNIDNADTLTRVISQIFDKALMEPTFCEMYANFCFHLARELPDFSEDNEKITFKRLLLNKCQEEFERGEREQEEANRADEEGEIKQSEEEREEKRIKARRRMLGNIRLIGELYKKRMLTERIMHECIKKLLGQYQNPDEEDIESLCKLMSTIGEMIDHPKAKEHMDVYFDRMAKLSNNMKLSSRVRFMLKDAIDLRKNKWQQRRKVEGPKKIEEVHRDAAQERQAQASRLSRGPSMNSSTRRGAPPMDFGPRGSTMLSSPNSQMGGFRGLPSPQVRGFGAQDVRLEDRQSYESRTPSVPLPHRSIGDDSITLGPQGGLARGMSIRGPPAMSSGPLGDISPGSGDSRRLTAGLNGYSSRFDRGFDRSLATSPPARAHGPAVSQNVWPEERLRDMSIAAIKEFYSAKDENEVALCIKDLNSPGFYPSMVSIWVTDSFERKDKEMDMLAKLLVNLTKSRDAMLSQVQLIKGFEAVLTALEDAVNDAPKAAEFLGRIFAMVIIENVIPLRELGQIILEGGEEPGRLREIGLAAEVLGSTLEIIKSEKGENVLNEIRKVSNLRLDDFRPPDPSYRSAKLDKFI

SEQ ID NO: 284 - DNA, 2742 bp, Chlamydomonas reinhardtii
attaagtcgtgtccagactcagctaggagccatgactgtcgagggagaagaaatttcactgcggccgctgcgcccgggtggcaacgcggccaacccgtttgccagcttcggcaagggtctgggctttggcaagggcaagaaagctgcggccccggttgtggaggacaagccgcccaagaagaacagcgagcgggtccggtatcccaaggacttcctgctcaagtttatggagaagtacaacagctgcccgagcgagctggagcagctgaacctggactgtgttgtgaccggcgaggaccgccaggcgcagcaggaggtgctccagaaagtcgcggaggagattgatgaccgcgactggcgctcgcgcacatcggtgggcaactaccgcgaggagcgcgagttccgggagcccaagcagcgggaggccagggagacggcggagccccgccagcagcaggcccgccaggcgcccgcgccccgcgaggctgctcctcagcaggcgcagcagcaggcgcagcccgcggcgtctagcggccctagcggtgatgagcagaatatggcgcgcattgccaaggcggccgatctgggccgccaggcctacaaagtgggcggcaccctgtcggctgaggagcgggcggtgcgctcggtgaagggtattctgaacaagctgacgccggagaagttcgatcggctgctgaaccagctgctggaggtgatcaccaccgcggacatcctgcagaagaccattgcgctggtgtttgagaacgcggtggagcagcccacgtacgtggccatgtacggcgacttgtgcgtcagcctgtcgaaggagctgccgtcgtttccgccgcctcccggctcggacaagccgctgcagttccgccagattctgcttaacacctgccaggacgagttcgagggagcggcggaggcgcgcgaggcgctggtgtcgatcagcgacagcgcggagcgcgacgaggctgagcgcaatgtgaagaagcgcgtgctgggtaacatgcgcctgatgtcggagctgtacaagcaggagatggtcaaggactggattatggtgacctgcattgacgagctgctgctggcgcgcgccaccaagggcgccaaggtgccgccggaggataacatcgaggccgtgctggagatcgtcaagctgtcgggcatcaagctctcgaagagcgagaagccggagacgctgaagaagctcgacaaggtggtgaaggagctggagcggctgcacaatgacaaaaacaatggcatctccacgcgtgtgcgtctggcaattcgcgaaatcctggagctgcgcaaggccaactggattccgcgccgggagacgtacactgccaagaagctggacgatgtccgtgcgcaggcggaggcggagctgggcatgatcagctccagtatcgcggcgtcgctgccgcagctgggctccgccatgccgcggtacggcgaggctatgggcgcgatgggcggccgcgacgacggcggcttcggcctcatacccccgctgcgcgcggacggcgacgtgcagctgttccccgctttccgcggcgacgcgtcctccgaccgtggcggcttcagcagcgcgggtgccggcaagggcgccagcgcgctgctgggcgactacacgccgccgcccgtgcgggtgcagctgcccatgcggacggagcccgcgccgcaggtggcgcagcaggagcccgtggcgccctctcggcccgccgctgtggcccctggcaaggcgctcagcgaggaggaggtcgtccgcaagtcgcagagtctgtaccaggagttcaccagcacgctggataaggcggaggcgacgacatgcgtgcgggagttggggtcgcaacatctagcaaaggttgtggagattggtctggaccagatcttcaactcgctcaaggagaaggagcaggacgcgctgctggacctgctcctgcacttgcacgaggcgggcgccatcactagcgaaaacgtggtggacgcgctcaccaccttcaccacccagctggaagacctcagcatggatgtgcccaaggcgccgcagctactgggccgcttctacggctcgtgcgtgtcgcgcaacatcgcgtcgctagacctgctgccgcagctgatggagggggatgcctcggtggagcccaagcgccgcttcagcggggcggcgttcaaggtgctgcggggcgccaagggcgacgcggggctcaccagcctgtgctccgaggtgggtctcactgccagcaccttcctcactgcggaccccgagttcgacaaggacgagccggcgctggaggagtggctgaagagcgagggcctcaccggcctggtgccgcttaacccgcaccagggattagcagtgtcgtctgccgtgtacgttggctttcgtgttgtcgagggctacctgggtgtctgacggttgggcgagtaggttgccaagggcggtctgccgtgctgtccgcgatgcgcctgcttccgccggaggatgccggagtgcttgtgtgttaccgagtgcggtgagcgtttatggaccggactggccacgaggctgaacggcattgactgcacacaagttgctagggggcgccgcaataggacatcacgtgatgtgaagcattgagctgggcatccctgtgcttcatgaaggaaggacgcgcgggcgtgcaggcgcccccattgtggggcccggaggcctcgttttaaggggactcctgtaagctaccgcggagtttc

SEQ ID NO: 285 - protein, 797 aa, Chlamydomonas reinhardtii
MTVEGEEISLRPLRPGGNAANPFASFGKGLGFGKGKKAAAPVVEDKPPKKNSERVRYPKDFLLKFMEKYNSCPSELEQLNLDCVVTGEDRQAQQEVLQKVAEEIDDRDWRSRTSVGNYREEREFREPKQREARETAEPRQQQARQAPAPREAAPQQAQQQAQPAASSGPSGDEQNMARIAKAADLGRQAYKVGGTLSAEERAVRSVKGILNKLTPEKFDRLLNQLLEVITTADILQKTIALVFENAVEQPTYVAMYGDLCVSLSKELPSFPPPPGSDKPLQFRQILLNTCQDEFEGAAEAREALVSISDSAERDEAERNVKKRVLGNMRLMSELYKQEMVKDWIMVTCIDELLLARATKGAKVPPEDNIEAVLEIVKLSGIKLSKSEKPETLKKLDKVVKELERLHNDKNNGISTRVRLAIREILELRKANWIPRRETYTAKKLDDVRAQAEAELGMISSSIAASLPQLGSAMPRYGEAMGAMGGRDDGGFGLIPPLRADGDVQLFPAFRGDASSDRGGFSSAGAGKGASALLGDYTPPPVRVQLPMRTEPAPQVAQQEPVAPSRPAAVAPGKALSEEEVVRKSQSLYQEFTSTLDKAEATTCVRELGSQHLAKVVEIGLDQIFNSLKEKEQDALLDLLLHLHEAGAITSENVVDALTTFTTQLEDLSMDVPKAPQLLGRFYGSCVSRNIASLDLLPQLMEGDASVEPKRRFSGAAFKVLRGAKGDAGLTSLCSEVGLTASTFLTADPEFDKDEPALEEWLKSEGLTGLVPLNPHQGLAVSSAVYVGFRVVEGYLGV

SEQ ID NO: 286 - DNA, 2196 bp, Chlorella
atggcggctctggacgcagacagcataagcctgcggcctctgagcctgcggcccggcggggccaacccgttcgccgggttcgcaaagggagcgggcgtgggattgaagaacaagactgtgtccaccaacccgccggaggagaggaagaagaaggcgcctggggagatcatccgctactctcgagacttcctcatgaagtttgtgcagaagtacaaccgggtgcctcaggagctgcagtactcaaacagcgacatcttgctggcggcagacgacccggggcgcgagcagcagcagcagctgctgcagcgcgtggcggcggacgaagccgacgagcgcgactggcggtcgaggactacgctgccgccggggcccgcccccgcgcccgccgccgccggcggccagcaacagcagcagcagcagcagcagcccggctggcgccccgaccagcagcccggcatgccgccgccgtcgggcggggccgaggcagccaagatccagaaggccactgacattgggcgcacggcgtggcacgcgggcgtggcgaccgagggcgtggagcagacgctgcgcaaggtcaagggcatcctcaacaagctcacgcccgagaagtttgagcgcctgctgtcccagctcatccccatggtcagcggctacgaggtgctgcagggcaccatccgccaggtgtttgagaacgcggtgcagcagcccacctttgtggccatgtatgccgacctgtgccgcgagctggacgccgcgctgccagagttccatgcacccggtgaggacaagcccaccgggttcaagaagatgctggccaacacgtgccaggaggagtacgaggcgacagaggaggcgcgcaaggagctgaagagcctgccggcggaggagcggcccgacgcggagcggcgcgccaagcagcgcctgctgggcaacatccgcctcatcgcggagctgttcaacaaggcgcaggtcaacgatcgcatcatgctgctcatcctggccgacctgctggggggcgccgacaacgacccgccggaggacagcgtggaggctgtgtgcgagctgctgtccacggcgggcgcggagctgcagaagagcagcaagggcaaggcgcggctggatgccgccttccgccagctggagcgcctcagcaacgcctccaaggtctacgcctcccgcatccgctttgtgatgaaggacctgctggagctgagggcgcagcactgggtggcgcgcagagagacgttcacggtgcgcggcggcgtggtgtggctctggccgcgtggcggcgtggcggctgccgccaagaagctggacgacattcgcagcgaggcgcaggcggagctgggcattgtggatgtgcccatcgcggggctggacacgctgccgggcgcgctgccgccgctggcggccaagcggcccgaggaggtggagctgttcccggccttcaagagcagcgacgcggggtgggctgtggcgcgcgggaacaagggcgaggcggccggcggcggcaagttctcggccttcctgggcgagtacgtggcggtggcctcgcaggcggcagaggtggcggggcccagcggcagggcgccacgcaccgacctgtctcccgaggagcgtgagagcctgggcaagagcctgttcagcgactacctgtgcagcccagacctggaggaggcggtgggcaccgcgcaagagctggaggcccccggcttcatgcccaagctggtgcagattgggctggagaaggcattcgatgcgatgacggagcgggagcagaccagcctggtggatctgctggcgacgctggcggcgcggggcgtgcttggagcggacgacctcaaggagggcaccgcggggctgatggaggggctggaggactttgcgctggacatccccgccgcgccgcgcctgctgggccgcctgctgggcgccgccgccgcgggcggcttgctaggcctggactgggtggcgggcgcggtggcgccgtgtgagagcgcagagccgcgccgcgccttcctggcggcggcgctcaaggcggcgcaggaggcgggcggcgacgagcgggtggcggcgctgtgccaagagggcaagctcgacctgcagcagctgctggcctttgacccggagtttgatggcgacatgccgcccgccgccgacttcctgcagcagcaaggcctgggcgcgctggcatag

SEQ ID NO: 287 - protein, 731 aa, Chlorella
MAALDADSISLRPLSLRPGGANPFAGFAKGAGVGLKNKTVSTNPPEERKKKAPGEIIRYSRDFLMKFVQKYNRVPQELQYSNSDILLAADDPGREQQQQLLQRVAADEADERDWRSRTTLPPGPAPAPAAAGGQQQQQQQQQPGWRPDQQPGMPPPSGGAEAAKIQKATDIGRTAWHAGVATEGVEQTLRKVKGILNKLTPEKFERLLSQLIPMVSGYEVLQGTIRQVFENAVQQPTFVAMYADLCRELDAALPEFHAPGEDKPTGFKKMLANTCQEEYEATEEARKELKSLPAEERPDAERRAKQRLLGNIRLIAELFNKAQVNDRIMLLILADLLGGADNDPPEDSVEAVCELLSTAGAELQKSSKGKARLDAAFRQLERLSNASKVYASRIRFVMKDLLELRAQHWVARRETFTVRGGVVWLWPRGGVAAAAKKLDDIRSEAQAELGIVDVPIAGLDTLPGALPPLAAKRPEEVELFPAFKSSDAGWAVARGNKGEAAGGGKFSAFLGEYVAVASQAAEVAGPSGRAPRTDLSPEERESLGKSLFSDYLCSPDLEEAVGTAQELEAPGFMPKLVQIGLEKAFDAMTEREQTSLVDLLATLAARGVLGADDLKEGTAGLMEGLEDFALDIPAAPRLLGRLLGAAAAGGLLGLDWVAGAVAPCESAEPRRAFLAAALKAAQEAGGDERVAALCQEGKLDLQQLLAFDPEFDGDMPPAADFLQQQGLGALA

SEQ ID NO: 288 - DNA, 2626 bp, Physcomitrella patens
atggaagccgccgcgccgcctcccgcatcgcaaccagctccgacctcggtctcgctgcgtcccggtggtggcaagtccctctccttccgcccccacagtgcccccttccagaatggttcgaggggtgcgttttcggacgaccctgcggcccttaaccctaacgtagccaccaccaagttcgtgctgcgggagcggcccgtcaggagctaccatgagaggattcgatactctagggatcgtttgctggagtttcgcgatgcctgtacgcaggcgccggaacagcttgtgaactcgggaatcagtagtttgaccgccagccccgaggttgaggatgattggaccaggagggagccgagggatttgccgcaaccgcctgttgctagagttgcagagtctgatgatagggattggaaggcccgggctccgctccctccatctgcaccagtgcaagaggaaagatcctcgtctcgcgaacagcaaagggacaggaaccctaagcaccgcaatgacagaaatgacaggagcgatttcaatgatagaaatgacaatcggggtgctcgcgagcagacaaattcttcccagggccagcgtcagcaggagaacgcaccctcggggcctcttcctgcaattgtcaaggccgccaatccgtggtcggctcgaaggggagcccagtccgaaaaggagaaggtttaccggacggtgaagggcattttgaacaagctgacgcccgagaagtacgatgtgttggcggagcagatgatggaggccggaatcagctcggctgagatattgcagggcgtgatttcgctgatcttcgacaaagcagtgttggagccgacgttctgcgccatgtacgcgcggctgtgcgagcagttgagcaaggagctgccggagtttccgagcgaacaggccggggacaagccgataacgttcaggcgagtgctgctgaacacgtgccaggaggagttcgaaggcgcggacgcgatgcgcgaggagattaagaagatgacgaaggcggagcaggcagtggagcgcgcggagaaggagaagaaggtgaagctgcggactttggggaacatcaagctgattggtgagctgttcaagcagaagatgttgccggagaagatcgtgcacgcttgcatccaggagctgctggggcaggatccgaagggaataccggcggaggagaacgtggaggcgctgtgccacctgttcacgacggtggggaagcagctggaggagagtgcgaagtcgaggatggcgttcgacacgtacttcgcccggctgagggtgatcggagacagcaggagcctggcgtctcgaatccggttcatggtgcgcgacatcctggacctgaggtcgaacaagtggatgccgaggcgagaggagatgaaggcgaagacgatcagcgagattcacgcggatgcggaagcgaaattgggactacgaccggggatgatggcacttcgaaacgtgagagcagcgatgcccgggttcatgccaggggtcggaggtatgatgccaggaatgcccgggatgccgggaatgcctggagcaggagggggaatgcctggaatgccaggagcagggggggggatgcaaggggttccgacgatggggagcattatggggtcaggattggaggcggacggtcgtcctgcgagattttcctcttcgactgtgcgcactaactctgttggtcccagagctctaccacagggcagcggtgggttcagtttcatcggcaagtcaagcgcgttgctcggaaatagtcctgtcccaaccattgtccctgttcgccagagcggtcctgctgcagagcctcctaagcaggaggagtcattgaaggatcctgctcgggggccacctgcttcagctgaagcacgtgtggctgcagccgggcctccgtctgcagacttggtgaagaggtcggagtcgctgctgaaggagtacttttctatcgtggatctgaacgaggcactgctgtgtgtgcaagagttgaagaaccctagtttccatccggagtttgtgaggatcgcgatttcgactgcgctggagatgcgagagaaggagagtgggttagtgctgaaactgttggtgcacttgcagtcgaagggagtggtatcgagcgaggacttgcggggaggtgtggtgatggtggcggaggggcttgaggacatggcgatggatgcgccattggccccgaagcagttgggaggcatgatagcaggtctgattttgtcagaagcgtcggaggttcggttgatgcaggaagctgcagcgaagatagaggacgagtttctgcagaaggatgtgttgaaggctgtggtgaacaagttgaaggagaacgaggcgcaggtgggtgaggtgtgtcggaaggtttcggtggataaggagggactgttgagtgtgacagtggagggagacattgcgaagcttttaggttaaagcgaatgtctgaattatggtagatgtgatagacctgtgcagatttgccgatggacaacggtttgagactacctgttcgcactgataatcggaatctatttcaatgtaggctgaggcgcactcttctgaaggtgtcgtgacgttagttttatcctcgtctctgtttctatgagacccg

SEQ ID NO: 289 - protein, 815 aa, Physcomitrella patens
MEAAAPPPASQPAPTSVSLRPGGGKSLSFRPHSAPFQNGSRGAFSDDPAALNPNVATTKFVLRERPVRSYHERIRYSRDRLLEFRDACTQAPEQLVNSGISSLTASPEVEDDWTRREPRDLPQPPVARVAESDDRDWKARAPLPPSAPVQEERSSSREQQRDRNPKHRNDRNDRSDFNDRNDNRGAREQTNSSQGQRQQENAPSGPLPAIVKAANPWSARRGAQSEKEKVYRTVKGILNKLTPEKYDVLAEQMMEAGISSAEILQGVISLIFDKAVLEPTFCAMYARLCEQLSKELPEFPSEQAGDKPITFRRVLLNTCQEEFEGADAMREEIKKMTKAEQAVERAEKEKKVKLRTLGNIKLIGELFKQKMLPEKIVHACIQELLGQDPKGIPAEENVEALCHLFTTVGKQLEESAKSRMAFDTYFARLRVIGDSRSLASRIRFMVRDILDLRSNKWMPRREEMKAKTISEIHADAEAKLGLRPGMMALRNVRAAMPGFMPGVGGMMPGMPGMPGMPGAGGGMPGMPGAGGGMQGVPTMGSIMGSGLEADGRPARFSSSTVRTNSVGPRALPQGSGGFSFIGKSSALLGNSPVPTIVPVRQSGPAAEPPKQEESLKDPARGPPASAEARVAAAGPPSADLVKRSESLLKEYFSIVDLNEALLCVQELKNPSFHPEFVRIAISTALEMREKESGLVLKLLVHLQSKGVVSSEDLRGGVVMVAEGLEDMAMDAPLAPKQLGGMIAGLILSEASEVRLMQEAAAKIEDEFLQKDVLKAVVNKLKENEAQVGEVCRKVSVDKEGLLSVTVEGDIAKLLG

SEQ ID NO: 290 - DNA, 2553 bp, Seliginella moellendorffii
atggaggtgtcgtcaataacgccatcgtcgctcgtcggatcctcaggcgctaccacagatttggggggagtgagcctccggcctggcggcggccgagggtttccgaggtttgggaccagcaacggtgcccccggcgatgcaactggaggattcttggggccgggagggaggacgccctccggattcgtcttccgacccgctccagccaaggagtcgaggaaggccgattgggaaaagctgcggtacacaagggaggatttattgcagtatcaagagatctgtcgcgatgctacatcggagattttgagcttggtcgctgaggtgaattccagcttgagcgaggaacaagaatggagccgtctggacacaatgccccagagaccggtggaaactgataaaagagattggcgtacacgcagtacctcggaagacaaggtgtcgcctgtggattactccaaagagagagcgtcgagccagttcaatgcgcgacagccacctccgaacgaccggcaggcagctcctccaatagtgaaggcagctaatccttgggtccggaggggatcacagtctgaggaggagcgggtgtttagaacggtcaagggaatattgaacaagttgacacctgaaaagtatgacgtgttgctggaacaattgttgcaagctggcattgatactgctgagaagctcaagggagttatctcgttaatcttcgacaaggctgttgcagagccgacattctgtcccatgtattcacaactatgtgtacatttgagcactaccttgcaagaatttccttcttccgagccgggagagaagcctacgacctttcgtcggattctgctgaacacttgccaggaagaatttgaaggcgccgctgcattacgtgctgaagtgaaagaaatgcgatcgcctgagcaagaacttgaacgcatggacaaagaaagaaaggttaaactacgcacacttgggaacattcgatttattggcgagcttttcaagcaaaggatgatccccgagaagatcgtgcacgcttgcattatggagttacttggaccggatcggactgctattcctgttgaagaaaatatcgaagcactttgccagctttttgcgactgttggaaagcaagtcgaggaaaacttgaagtcccgatcgtcgctggacgaatatttccggagaatgaaagagttgggtaacaacaagaacctgccttcgagattgcggttcatggtccgcgacgtattggatctgcgtagcaacaagtggattccaagacgagaagagataaaagcaaagaccataaacgaaattcacgcggaagcagagcagaaactcgggatacgttcgagaaacggaaggcccgggagtgccataaacaaggatccatcgttcatgccagcgggtcggttgatgcctggtgcacccatgcccggtgctcctggagcgcctggggggcctcctcgttcaatgggaatagaccccgatggtccttgggaaatggctggacccaagaagagtaagcagcgagaagcggcggcagcggcggcagcgatgtcctatcagtcagcaaacattcccggccgcgtcccgggtagacaacaaagggtgctaccacaggcaagttcggtgttcttggggaagtctagtccgctgctcgggaccgggggtccaacggccgaagcgccaccagcggctccaaagccagctccggctccagctccgactccagctccaactcctccggttatcagtgaagagcgagccgcgacgccatctccatcatcgggcatactgaacaagaagtctgagtcgctactggaggagtacttcagcatcatggacttgaccgaggcaacgctgtgcatccaggagatgaagtctccggactatcatccacagttcgtccaggttgccgtgacactggcgctggagaagcgcgacagggagcgcgagctcctcttcaagctcttcaaccatctccatgcgcagggggtggtgacggaggcgcagctcgcgtcggggctgatgcttctagccgagcagctggacgagaccgccatcgacagtcccatggcgcccaaacagattggccagctcgttgcggcgctcgcgacgtcgcgagctttgcagctgaagatcttgccggggattctggagaaggtccaggacgagtatgtccggcgccaggtgctcgaggcggtgctcaaggatctaaagtccagagatggcggtgacaaggtgatggtctcggccaggagcgatttgaagagctgcgtcaagctcttgaacgaagaggaggaggcgctaatgcagaccctacagagggaagggatatctatctaagtttatgggcgagtggaaaatgtggtgcacaggcaaagtgtagctatgtcttttgaaccggtttccttttttcttttcgctttggagagaacaaaaaaagaacaaaagcggaattttcgtttgatatagtaatactatacattattattaagaagtaattagattgtagagtcctaatgcagaattattttaattaatttttattaaaac

SEQ ID NO: 291 - protein, 780 aa, Selaginella moellendorffii
MEVSSITPSSLVGSSGATTDLGGVSLRPGGGRGFPRFGTSNGAPGDATGGFLGPGGRTPSGFVFRPAPAKESRKADWEKLRYTREDLLQYQEICRDATSEILSLVAEVNSSLSEEQEWSRLDTMPQRPVETDKRDWRTRSTSEDKVSPVDYSKERASSQFNARQPPPNDRQAAPPIVKAANPWVRRGSQSEEERVFRTVKGILNKLTPEKYDVLLEQLLQAGIDTAEKLKGVISLIFDKAVAEPTFCPMYSQLCVHLSTTLQEFPSSEPGEKPTTFRRILLNTCQEEFEGAAALRAEVKEMRSPEQELERMDKERKVKLRTLGNIRFIGELFKQRMIPEKIVHACIMELLGPDRTAIPVEENIEALCQLFATVGKQVEENLKSRSSLDEYFRRMKELGNNKNLPSRLRFMVRDVLDLRSNKWIPRREEIKAKTINEIHAEAEQKLGIRSRNGRPGSAINKDPSFMPAGRLMPGAPMPGAPGAPGGPPRSMGIDPDGPWEMAGPKKSKQREAAAAAAAMSYQSANIPGRVPGRQQRVLPQASSVFLGKSSPLLGTGGPTAEAPPAAPKPAPAPAPTPAPTPPVISEERAATPSPSSGILNKKSESLLEEYFSIMDLTEATLCIQEMKSPDYHPQFVQVAVTLALEKRDRERELLFKLFNHLHAQGVVTEAQLASGLMLLAEQLDETAIDSPMAPKQIGQLVAALATSRALQLKILPGILEKVQDEYVRRQVLEAVLKDLKSRDGGDKVMVSARSDLKSCVKLLNEEEEALMQTLQREGISI

SEQ ID NO: 292 - DNA, 3087 bp, Volvox carterii
cgccgttgctttgcagactgcttattggcccaggagcctagagcagccaatgacagtcgaggatgaagtcagcctccggcccttagccctcaggccggggggaaatgtcgcgaatccgtttgcaagctttggcaaaggccttggctatggtgttaagggcaagaaagcggcagcatcctcttcagcagaagacaagcctccgaagaagaatggagagcgggttcggtatgcgaaggacttcttgcttaagtttatggagaagtataacaattgcccaagcgagctggagcaactgaacctcgagattgttgtgacgggcgaggaccgccaggcgcagcaggaagttcttcaggcaagggatgtaaaagttgcggaagagattgacgacagggattggcgcgcccgaactgctgtcagcaattaccgtgagccatatgaggaacgcgagtttcgggagccgaagcagcagcgcgagccaagggagcctgtcgagtcacgacagcagcgtccggctcccacgcgtcaggatgcggcgcagcagcaaccaacccagctggccccacctgcgccagcagctcaacaacccgtagccggtgataatgcaaccagcacggccggtaacggccaggatacctcccgcattgcaaaggcctcggacgtgggccgtcaggcgtaccggcctggaggtgtgctgtcaaccgaggagcgggctgtacgctctgtaaagggtatcctaaacaagcttacgcccgaaaagtttgagcggctactgaatcagctcctagaggtaattactactgcagacatcctgcagaagacgatagcgctagtgtttgaaaacgctgtggagcagccgacgtacgtcgccatgtacggcgatctctgcgtcagcctgtccaaggagctgccgcaattcccgccgccgccgggctctgacaagccgctcagcttccgccagattctcctcaacacttgccaagacgagtttgagggcgcatcagaagcccgcgaggagctctcgaatatcagcgatccgactgagcgtgaggaagcggagcggcgcgtgaagaagcgtgtgctgggtaacatgcgccttatatcggagctttacaaacaggacatggtcaaggactggatcatggtgacctgcattgtcgagctgctgtcagcacgggctaccaagtcggccaagacggcccccgaggataacattgaggctgtgttggaaatcatcaagttgtcgggagcgaagctatctaagagcgataagcaggaaacgctgaagaagctggacaaggtgatgcgggagctggagcggctgatgaccgataaagctaatggcattacgacgcgtgtgcgtttggccatcaaggacgtgatggagctgaaacgcgcgaattgggtgccgcgtcgggaggcctacacagccaagaagttggacgaagtgcgcgcgcaggcggaggcagagctgggcatgatcagctcaagcattgcagcgtcattaccacagctgcctggcgcgattccgcggtacggcgagccaatgggtttgggtccaggtggcctggcgggcatgggcgccggtgcccgcgacgacgcagcgttgggtctcataccgccgctccgctctgaagcggacgtggcgctgttccctgcgttccgtggcgattcgggggcggaccggggcttcagccgcggtagcgcgctgctgggagattacaagccgccgccaatacgcgtgcagctgccgatgcagcgacaggagcaggtaccagtggtggtacaagaagcgccagctccttccaggcctgcaccggctgcaggtggcaaggcgctcagcgacgaggaggtggcccgcaaggcacagaacctgtacgaggagttcaccagcacgctggacaaggctgaggcgaccacctgcgtaagggagctggggccccaacacctcgcgaagtacatgcaagtttgcaagcaatttgtgcgcaaatgttgcacggttcgatatgagccacaggtggtggagattggcttggatcagatgttcaactcgctcaaagaaaaggaacaggacgcgctgctggacctgatcttgcacttccacgatgcgggcgcaattacgagtgcaaacgccgtggatgcgctcaccacgtacactacgcaactggaggacctcagtatggatgtgcccaaggcgccgcaactgctgggccgcttctacggctcgtgcgtatcccgaaacattgcatcgctggatctgctgcctcagctcatggagggagacgcgtccgtggagcccaagcgccggttcagcggtgcggcctttaaggttctgcgcagcgcgaagggcgatcagggattggcgaagatgtgcggtgatgtagggctggcggcgggcacattcctggaagcagaccccgaatttgaccgtgatgagccgtcccttgctaactggctaaaggccgagcgtttggccggcattgtacctgtttgacttagagcactgaaaaaggcaggggtttccgctttggggttctgatggctttcgctgagatggatgctgcaggtcgatccatagctgacaagcgcaagggggttaggataaattgtgtgggttatagcatgggcgttaggtgcagtctggccgcagggcggatatcttagatgaggatgggatgcgccgtagtagcgcgataaggcatgagaggagctgcagcattaggtacaaataccggatgctgtttcgtgaagctgaggtcgagtgtggaacggagcgggaggattttttgtggttcattaggtgctcaaactatgcaagccgagtggcgatgagggagcgatgcgataggtgtcggcttgagaaatgcagacatgaggggttgtcacctgcgcggctgcaacgtcgcttgggttttggccaaacgcgcgtgtgccgtgtcgattgaggctggcgcgcctgttgactgggcacgcattaaggtgccgattaaagagtgttttatgaggcgcaatgttggtattgcaacgtggcagttacaaatatataccatgttttaacatggttcagctgtgtttgtaaatgtcacctgc

SEQ ID NO: 293 - protein, 813 aa, Volvox carterii
MTVEDEVSLRPLALRPGGNVANPFASFGKGLGYGVKGKKAAASSSAEDKPPKKNGERVRYAKDFLLKFMEKYNNCPSELEQLNLEIVVTGEDRQAQQEVLQARDVKVAEEIDDRDWRARTAVSNYREPYEEREFREPKQQREPREPVESRQQRPAPTRQDAAQQQPTQLAPPAPAAQQPVAGDNATSTAGNGQDTSRIAKASDVGRQAYRPGGVLSTEERAVRSVKGILNKLTPEKFERLLNQLLEVITTADILQKTIALVFENAVEQPTYVAMYGDLCVSLSKELPQFPPPPGSDKPLSFRQILLNTCQDEFEGASEAREELSNISDPTEREEAERRVKKRVLGNMRLISELYKQDMVKDWIMVTCIVELLSARATKSAKTAPEDNIEAVLEIIKLSGAKLSKSDKQETLKKLDKVMRELERLMTDKANGITTRVRLAIKDVMELKRANWVPRREAYTAKKLDEVRAQAEAELGMISSSIAASLPQLPGAIPRYGEPMGLGPGGLAGMGAGARDDAALGLIPPLRSEADVALFPAFRGDSGADRGFSRGSALLGDYKPPPIRVQLPMQRQEQVPVVVQEAPAPSRPAPAAGGKALSDEEVARKAQNLYEEFTSTLDKAEATTCVRELGPQHLAKYMQVCKQFVRKCCTVRYEPQVVEIGLDQMFNSLKEKEQDALLDLILHFHDAGAITSANAVDALTTYTTQLEDLSMDVPKAPQLLGRFYGSCVSRNIASLDLLPQLMEGDASVEPKRRFSGAAFKVLRSAKGDQGLAKMCGDVGLAAGTFLEADPEFDRDEPSLANWLKAERLAGIVPV

SEQ ID NO: 294 - DNA, 2205 bp, Ostreococcus RCC809
atgaaggcgatgcgtgactcgccgctcgctcagacgaagcccgcgaactggatcgtgccggatgacacggattactggccggttcccggtttcatctgcccgcccggtgtgcaatcctttggtggaggacgtagtggcggacgtcgcggcggtagccgcggcggtggtggttacgataagaagggagacgacaagtgggcgcaccgtcaacttccggcggacggtggaagacgcggtgaccgccgcgggggaggatacaaccagtctcaataccgtattcctccgggcgagttgccaaagttgcacaagacggataagaagtatgtcatcggtgtggtcgatgatgaagaacaaaagcgacaacgtgcgttcaaggccattctcaacaagctcacgcctgataactttgagaagcttcttgaaaagatcctcgatgtcggcatcaccgaggtcgaaaccttggtgggtctcatcggccagttgttcgaaaaggctctgcaagagccgacgttctcttccttatacgcccaactgtgccgcgtactttctgatcgattcgagagtgagggtgtagaattcttagatccaactgccgagaaaggactgcaggctattacatttaagcgcgtccttttgaagaaatgccagcaagagtttgagtctggcgacaaggccatcgcgaaggctgaagcgggtgaagatgaagatgatgagaagaaggaagaagaaaaggaaggtgaagaaaagactgaagagaagaaggagctcgaagagggcgaaatcgacgagccgccgaagccgaagacagaggaagaacttgccctcgaagagcgacgcaaacagctcaagagagaagaaaagatccttcaagcacgcagacgtatgcttggtaacattcgtttcatcggtgaactgttcaagaagactatgctcgccgagggtgtcatgcacacgtgcatcatgaagctgttgggcgacggcaagagagatccgacggaagaggacgtcgaagccttgtgcaagctcatgatgactgttggtggtcagcttgactcacccaaggcgaaggcgtacatggatgcttacttctcacgcatagcaactttgagcaaattgaccgatttgtcatctcgtcatcgattcatgttgcaagacgtcatcgatacgcgctcgaagggttggcgtgagcgtcgcaagcaagagggacccaagaagattgaggaagttcaccgcgacgcgcagcgacaagcgatggagcaaacgcgccgcgccggtatccgaccggaacgatctacgtcgtttggcaatctgtcccgttctgatagtcgaagaggtgactttgagcgtcctccgagccgcggtgcccgcgggggagacgatcgaggcagtttccaacgctctgattctcgaagtggattcggaggcgaccgtcgtggcgattcgagaagcggaagagacttcgatgcccgatccacgatcccggcgccgaacagaaccgttccggctcccaacaaaacggtgccggcgcccgcctcggctgttcccgctccgaagacggcgactgacgaaaaggagtccgccgccgacgatgaggcgttcatcgctgagcgcaaaaagatcacggagtacttctatgacgacaaggacgtgagtgaagccatcaaggtgatcgccacgtggagtggcacgcgtctcgtcggtttcattgaatacttcttgacgacgagctttgagcgacgcgacatggattgggacgccgcatacggtctcgttcgcgctctcgccgcctctgacggtcccatgtccggcgcacaattgatcgaggggtttgtaccgctcttcaacaacatcgaagacgtcatgtgcgatcttcccaaggctggtgagcacatcgccgcgtgcgtcgccggtcccgtcctcgacggttcgtgcgcgctcgccgacgtcgcctccgcccttcgcaaagcaaccccagagggcgaagagcccggatacaccttagccgaaggtttcgccctcacgattttcgcgcacacgctcgcccaagtccaacgtctcgccggcgacgacgactcggccaagatgcccgcgctcctccgggcctccggcgtcgccctcgccgatctccgcggcgacgtcgacaaggaggacgacaccgtcgtccccaaactcattgaaaaactcggtttgcgcggcgtacagtag

SEQ ID NO: 295 - protein, 734 aa, Ostreococcus RCC809
MKAMRDSPLAQTKPANWIVPDDTDYWPVPGFICPPGVQSFGGGRSGGRRGGSRGGGGYDKKGDDKWAHRQLPADGGRRGDRRGGGYNQSQYRIPPGELPKLHKTDKKYVIGVVDDEEQKRQRAFKAILNKLTPDNFEKLLEKILDVGITEVETLVGLIGQLFEKALQEPTFSSLYAQLCRVLSDRFESEGVEFLDPTAEKGLQAITFKRVLLKKCQQEFESGDKAIAKAEAGEDEDDEKKEEEKEGEEKTEEKKELEEGEIDEPPKPKTEEELALEERRKQLKREEKILQARRRMLGNIRFIGELFKKTMLAEGVMHTCIMKLLGDGKRDPTEEDVEALCKLMMTVGGQLDSPKAKAYMDAYFSRIATLSKLTDLSSRHRFMLQDVIDTRSKGWRERRKQEGPKKIEEVHRDAQRQAMEQTRRAGIRPERSTSFGNLSRSDSRRGDFERPPSRGARGGDDRGSFQRSDSRSGFGGDRRGDSRSGRDFDARSTIPAPNRTVPAPNKTVPAPASAVPAPKTATDEKESAADDEAFIAERKKITEYFYDDKDVSEAIKVIATWSGTRLVGFIEYFLTTSFERRDMDWDAAYGLVRALAASDGPMSGAQLIEGFVPLFNNIEDVMCDLPKAGEHIAACVAGPVLDGSCALADVASALRKATPEGEEPGYTLAEGFALTIFAHTLAQVQRLAGDDDSAKMPALLRASGVALADLRGDVDKEDDTVVPKLIEKLGLRGVQ

SEQ ID NO: 296 - DNA, 2873 bp, Ostreococcus taurii
cgctctcgaccgcgacacgctcgatcgtccgcggcgcatcgtccgtgctcgtccactcgggcgcgcgcgcgcgaagagagaccggaacgaggtctcgaacgcgatcgacggcgccgacgtcgaggcggcgctcgatcgaaacgaatccgcgccgcgcgcgagggcgtcgatcccgcgcgtgagggacgagagggatgagcggaaatggacaaacaccgaacagaggggtgccgcagccgcgcgcgggggcgcacggggggaaagcggatgagaagaaggtcatcgcgagcgcggggaacgcgagcgggccgccgcagcagcaattcatgttcggcacgatggacatgtcgaagtcgccgacgggacaaccggtgatgcctatgccggggatgcatccgggggcgaggccgcagatgccggtgggggggatgatgggaatgatgccgccgcagggtaagcccggaatgccggggatgatgccgggtcaaatgttcgtcccgggcggggctccgtatcatcccgggatgatgatgggtatgccgccgatgggtatgccggcgtacgccaagccgccgggaatgaagccgccggcgacgccgccggtgaagacggtgagcaaggcgatcaagattgtgaaccccaagacaaagcaagaggtcaagattgaaaagccgcccgagcccgaaaaccctgcgacgccggcgtccgattcgacgcccgcgcctccggccgcggccgcgcctccggccgctcccgcgtcgcccgcgccgccggctcctaccacggcaccgcaaccagcggtaccggcgcccgcggtgccagcgccgatcaacttcgccgccgtggcggccaagcccgctgtgccgaagcccgctccggcccctgtcgtgccgaaacccgtcgaaccggtcgcacccaaggttgcggaagtggtgaagccggcggccccggctccagcggcgatcaatttcgccgccatggcggccaaaccagcggcgccgccgaagccgcaaccggtcaagcaagaagaaacgccggccgcaactgagcctccgaagcacaaggcggtggaagcgctcgcggaagccgttgccggagtgaagttgagcaactctgaatccgtctccagctttgcttccgacgcggcctcggacgccgactcagacagcgggcaactctcgcgagtgcaatccgcaccaccgccggtgaccgagttcacgctcgtccccaagccggcggacgggaagtacagcgtcgaagagctcaaggcaatgcgcgatgcgccgatcgcgaacaccaagcccatcaactgggtcgttccggatgacattgactactggccggtgcccggcttcatctgcccacctggcgtgcagtccttcggcggcggtggcggtcgcggcggtcgacgcggcggtagccgtggcggtggtggcggtggaaaggttgatgacaaatgggcgcatcgtcagcttcccgcgggcgaaggaggacgccgtggagatcgtcgtggtggtggcggctacaatcaaacccagtaccgcattccggctggcgaactccccaagcttcacaagacggataaaaagtacgtcatcggcaccattgacgacgaagaagagaaacgacagcgttcattcaaggcgattctcaacaagcttactccggataactttgagaagctcctcgagaagcttctcgatgtgggcatcactgaagctgcgacgctcgtcggactcatcggtcagttgtttgaaaaggcgcttcaagagccgaccttctcgtcgctctacgccgagctttgccgcgtgctctctgatcgttttatgaacgaaggcgtcgaatttttagatccaactgcgcctgaaggacaacagaagattacctttaagcgggttttactcaacaagtgtcaagaagagttcgagacgagcgacaaggcaatcgctcgcgccgaggctggggaggacgaagaagaagagacaaaagagggtgaagagggtgaagaggaaaaggaagagaagaagaaggagcttgaagacggcgaaattgacgagccgcccaaggagaagactccggaggaacttgagattgaggagcgccgaaagcagttaaagcgtgacgatcgactccttcaagcacgcagacgtatgctcggtaatattcgtttcattggtgaattattcaagaaatctatgcttaccgagcgtatcatgcatgtgtgcatccagaaacttctcggcgcgggcgagaagactccgagtgaagaggacgtcgaagcattatgcaagctcttgtccacggtgggcagtcaactcgatcatcagaaggccaagcaacacatggatgcttacttcagaagtgtggataaccttagcaagtcgagcgagctgtcttctcgtcatcgcttcatgttgcaagacgtcttggacatgcgcgccacgggatggcgcgagcgtagaaaacaagaggggccgaagaagattgcagagttgatcgaagggtgcgcgccgctcttcaacaacattgaagacatcctgtgcgacttgcccaaggctggcgaccacatcgccgcctgcatcgccggtcccgtcctcgatggcacgtgttcgctcgtcgatctcgccgccgcgcttcgcaaggccacgcccgatggtgaagagcccgggtacgccctggccgagggtttcgccctcaccctcttctcccaggttctctcgcacgcgcagcgcatcgccggggacgaagagaagatgcccgccctctacaaggcttctggcgtcgccctcaacgacctccgcggcgacgcggacaaagaggacgacaccgtcgttcccaaaatcatcgaaaaactcgcgttgaaaggaatctag

SEQ ID NO: 297 - protein, 892 aa, Ostreococcus taurii
MSGNGQTPNRGVPQPRAGAHGGKADEKKVIASAGNASGPPQQQFMFGTMDMSKSPTGQPVMPMPGMHPGARPQMPVGGMMGMMPPQGKPGMPGMMPGQMFVPGGAPYHPGMMMGMPPMGMPAYAKPPGMKPPATPPVKTVSKAIKIVNPKTKQEVKIEKPPEPENPATPASDSTPAPPAAAAPPAAPASPAPPAPTTAPQPAVPAPAVPAPINFAAVAAKPAVPKPAPAPVVPKPVEPVAPKVAEVVKPAAPAPAAINFAAMAAKPAAPPKPQPVKQEETPAATEPPKHKAVEALAEAVAGVKLSNSESVSSFASDAASDADSDSGQLSRVQSAPPPVTEFTLVPKPADGKYSVEELKAMRDAPIANTKPINWVVPDDIDYWPVPGFICPPGVQSFGGGGGRGGRRGGSRGGGGGGKVDDKWAHRQLPAGEGGRRGDRRGGGGYNQTQYRIPAGELPKLHKTDKKYVIGTIDDEEEKRQRSFKAILNKLTPDNFEKLLEKLLDVGITEAATLVGLIGQLFEKALQEPTFSSLYAELCRVLSDRFMNEGVEFLDPTAPEGQQKITFKRVLLNKCQEEFETSDKAIARAEAGEDEEEETKEGEEGEEEKEEKKKELEDGEIDEPPKEKTPEELEIEERRKQLKRDDRLLQARRRMLGNIRFIGELFKKSMLTERIMHVCIQKLLGAGEKTPSEEDVEALCKLLSTVGSQLDHQKAKQHMDAYFRSVDNLSKSSELSSRHRFMLQDVLDMRATGWRERRKQEGPKKIAELIEGCAPLFNNIEDILCDLPKAGDHIAACIAGPVLDGTCSLVDLAAALRKATPDGEEPGYALAEGFALTLFSQVLSHAQRIAGDEEKMPALYKASGVALNDLRGDADKEDDTVVPKIIEKLALKGI

SEQ ID NO: 298 - DNA, 2701 bp, Arabidopsis thaliana
aaaaggaaattagggcaaaccacagaacacagcttcagccaaaaaaaaaaagggaatcgaagtgattttatcttctccaccgtcaatacagacacatatatatacactatatacctctatctatctgcaaaacttttttttattgaatccttctaattgcgaaaaaacaagagaatcgagtaatgcaacaacaaggtgaaccatcggttttgagtttgagacccggcggtggcggcggcaaaagcaggcttttcgtccctcgctttagctcctcttcctcttttgatcttaccaatggcggctccgaagaaaccccttttcccgtcaagagagaaaattctggtgaacgtgtgaggttttcccgagaagagatacttcagcacagagagtctgttcaagtctctgatgaaattcttagacgctgtaaggaaatcgcagttgagctttttggcgaagagcagagttgggggaatcatgcagccgagagtaaaataacaaatcatactcagcatcgtcataccgagactgataaccgtgactggcatagtcgttctcagattccaacctctggtaaagaatggttaagggacgaccctcgtgaagccaaaagtacatggcaagggtctggtcctacccctgtgctgattaaagcggaggttccgtggtcagctaaaagaggagctctttcagataaagatcgagtcgttaagagcgtgaaaggtattctaaacaagcttactccggagaagtacgagcttcttaaaggtcaattgattgacgctggcatcacttccgcagatatcctaaaggaagtgatacagctaatttttgagaatgctatactgcagcccacattctgcgagatgtatgctcttctgtgttttgatattaacggacagctaccttcgtttccctctgaggaacccggtgggaaagaaataacctttaaaagagtgcttttgaataattgccaagaggcatttgaaggtgctggcaaattgaaggaagagatcagacagatgactaatccagaccaagaaatggaaagaatggataaggagaaaatggcaaagctccggacacttggaaatatccgtctgattggtgaacttctcaagcaaaagatggtgcctgagaagatagttcatcatattgttcaggagcttttaggagacgatactaaagcttgcccagcagagggagatgttgaagctctctgccaattttttataaccattgggaagcaacttgatgacagcccacgatctcgaggtattaatgacacgtactttggtcggttgaaggagctagcaaggcaccctcagctagagctgcgtctcagatttatggtccaaaacgttgttgatcttcgagctaataaatgggtaccaaggcgtgaggaggtgaaagcgaagaaaatcaatgaaatccattctgaggcagagagaaatcttgggatgcgtccgggtgcaatggcaagtatgagaaacaacaacaacaaccgcgctgcggtttctggtgcagcagacggtatgggcttgggaaatatccttggccgtcctggtactggaggaatgatgcccggcatgccgggaactagggtgatgcctatggatgaagacggctgggaaatggcacggacccggtccatgcccagaggcaatagacaaacagtgcagcagccgcgttttcagccacctcctgctatcaacaagtcactctcagtcaactcaaggcttcttcctcagggtagcggaggtctcctcaatggtggtggtaggccaagccctcttttgcaaggtaacggttctagctcagctcctcaagcctctaaacccattccaactgttgagaagccgcaaccacggtctcaacctcagccacagccacaggcagctcctctggctaatagcctgaacgcaggagagctcgagagaaaaaccaagtcgcttcttgaagagtatttcagtattcgtttagtggatgaggcattgcaatgcgttgaggaactaaaatctccatcttaccacccggagctcgtcaaggaaacaatctcgctcggtctagagaaaaacccaccattggttgaaccaattgccaaactcttgaaacatctgatctctaagaatgtgctgacatctaaagacttaggggcaggttgtttgctctacggttccatgttggatgacattggaatcgatctgccaaaagcaccaaacagcttcggagagttcttaggggagttggtctcagctaaagtcttggatttcgagctggtgagagatgttctgaagaagatggaagatgagtggttcagaaaaaccgtactcaatgcagtgataaagagtgttcgcgagtgtccatcgggacagtctgtattggattcgcaggcggttgaagttgaggcatgccagagtttgctctaaaagtaaattggtttggccggcaaagtcttaaaatgtttacttgaggagtagtctgaatcatttttcttatataagttttgagttaatatcacatacttggaagatttggttcagttttgttacatctttgtttttttcgttcatcttgagttttgaacatttcagggtgaggagaaaaaaaaacacaatttgttgattgttatcttattcttagtgcctacacaatttttgtctttgacattaataatctaattaattgtgggatgccttaattc

SEQ ID NO: 299 - protein, 747 aa, Arabidopsis thaliana
MQQQGEPSVLSLRPGGGGGKSRLFVPRFSSSSSFDLTNGGSEETPFPVKRENSGERVRFSREEILQHRESVQVSDEILRRCKEIAVELFGEEQSWGNHAAESKITNHTQHRHTETDNRDWHSRSQIPTSGKEWLRDDPREAKSTWQGSGPTPVLIKAEVPWSAKRGALSDKDRVVKSVKGILNKLTPEKYELLKGQLIDAGITSADILKEVIQLIFENAILQPTFCEMYALLCFDINGQLPSFPSEEPGGKEITFKRVLLNNCQEAFEGAGKLKEEIRQMTNPDQEMERMDKEKMAKLRTLGNIRLIGELLKQKMVPEKIVHHIVQELLGDDTKACPAEGDVEALCQFFITIGKQLDDSPRSRGINDTYFGRLKELARHPQLELRLRFMVQNVVDLRANKWVPRREEVKAKKINEIHSEAERNLGMRPGAMASMRNNNNNRAAVSGAADGMGLGNILGRPGTGGMMPGMPGTRVMPMDEDGWEMARTRSMPRGNRQTVQQPRFQPPPAINKSLSVNSRLLPQGSGGLLNGGGRPSPLLQGNGSSSAPQASKPIPTVEKPQPRSQPQPQPQAAPLANSLNAGELERKTKSLLEEYFSIRLVDEALQCVEELKSPSYHPELVKETISLGLEKNPPLVEPIAKLLKHLISKNVLTSKDLGAGCLLYGSMLDDIGIDLPKAPNSFGEFLGELVSAKVLDFELVRDVLKKMEDEWFRKTVLNAVIKSVRECPSGQSVLDSQAVEVEACQSLL

SEQ ID NO: 300 - DNA, 1366 bp, Oryza sativa
gtgcacaattgatgagcaatgcttttttataatgatgccaactttgtacaaaaaagcaggcttaaacaatggcggaatggcaccagagggatcccagtttgatgctaagcactatgattctaaaatgcaggagcttctgaaccaaggtgaaaccgaggagttcttcacatcttatgatgaagttcatgagagttttgatgacatgggtctccaagagaaccttctcagaggcatctatgcctatggtttcgagaagccttcagccattcagcaaaggggtattgtccctttctgcaagggtcttgatgtgattcagcaagctcagtcaggaacaggaaagactgccaccttctgttctggaattttgcagcaacttgactatgctgtggttgagtgccaggccttggtccttgctcctacccgtgagcttgcacagcaaattgagaaagtcatgcgcgcacttggtgactatctgggtgtgaaggttcatgcttgtgttggaggtacttctgttcgtgaggaccaaaggattcttgcaagtggagtgcatgttgttgttggaacacctggtcgtgtgtttgacatgctgcgtaggcagtccctccgtcctgattacatcaagatgtttgtccttgatgaagctgatgaaatgctttctcgtggtttcaaggatcagatttatgatatcttccagctcctcccgtcaaagatccaagttggtgtgttctctgctacaatgccccctgaggcccttgagatcacccgtaaattcatgaacaagcctgtgcggatccttgtgaagagggatgagctcactcttgagggtatcaaacagttttatgtcaatgtggagaaggaagaatggaagcttgacacactctgtgacctgtatgagacactggccatcacgcagagtgtcatctttgtgaacacccgccgcaaggtggactggctcactgataagatgaggggcagggatcacacagtttctgctacccatggtgacatggaccagaacactagggacatcatcatgagggagttccgatctggttcttcccgtgtgctcattaccacggaccttcttgcccgtggtattgatgtccagcaggtgtcccttgtcatcaactatgatctgccgacccaacccgagaactacctgcatcgcattggtcgtagtggtcgttttggtaggaaaggtgttgccattaactttgtgacccgtgacgatgagaggatgctgtttgacatccagaggttctacaatgtggtgattgaggagctgccggccaacgtcgctgaccttctgtgatcaagttcagaagagttatgttaaggggcctgaacccagctttcttgtacaaag

SEQ ID NO: 301 - protein, 411 aa, Oryza sativa
MAPEGSQFDAKHYDSKMQELLNQGETEEFFTSYDEVHESFDDMGLQENLLRGIYAYGFEKPSAIQQRGIVPFCKGLDVIQQAQSGTGKTATFCSGILQQLDYAVVECQALVLAPTRELAQQIEKVMRALGDYLGVKVHACVGGTSVREDQRILASGVHVVVGTPGRVFDMLRRQSLRPDYIKMFVLDEADEMLSRGFKDQIYDIFQLLPSKIQVGVFSATMPPEALEITRKFMNKPVRILVKRDELTLEGIKQFYVNVEKEEWKLDTLCDLYETLAITQSVIFVNTRRKVDWLTDKMRGRDHTVSATHGDMDQNTRDIIMREFRSGSSRVLITTDLLARGIDVQQVSLVINYDLPTQPENYLHRIGRSGRFGRKGVAINFVTRDDERMLFDIQRFYNVVIEELPANVADLL

SEQ ID NO: 302 - DNA, 1890 bp, Oryza sativa
aaaccctcttgtttctctctcctgctccccccccaacgccgccgccaccgccgccgccgccgccgccgaatccgagacccccatctcggattcacctctcccgcctccggcctccgtcaccgtctccccacgcgcgtcagtcatggcgggaatggcaccagagggatcccagtttgatgctaagcactatgattctaaaatgcaggagcttctgaaccaaggtgaaaccgaggagttcttcacatcttatgatgaagttcatgagagttttgatgacatgggtctccaagagaaccttctcagaggcatctatgcctatggtttcgagaagccttcagccattcagcaaaggggtattgtccctttctgcaagggtcttgatgtgattcagcaagctcagtcaggaacaggaaagactgccaccttctgttctggaattttgcagcaacttgactatgctgtggttgagtgccaggccttggtccttgctcctactcgtgagcttgcacagcaaattgagaaagtcatgcgcgcacttggtgactatctgggtgtgaaggttcatgcttgtgttggaggtacttctgttcgtgaggaccaaaggattcttgcaagtggagtgcatgttgttgttggaacacctggtcgtgtgtttgacatgctgcgtaggcagtccctccgtcctgattacatcaagatgtttgtccttgatgaagctgatgaaatgctttctcgtggtttcaaggatcagatttatgatatcttccagctcctcccgtcaaagatccaagttggtgtgttctctgctacaatgccccctgaggcccttgagatcacccgtaaattcatgaacaagcctgtgcggatccttgtgaagagggatgagctcactcttgagggtatcaaacagttttatgtcaatgtggagaaggaagaatggaagcttgacacactctgtgacctgtatgagacactggccatcacgcagagtgtcatctttgtgaacacccgccgcaaggtggactggctcactgataagatgaggggcagggatcacacagtttctgctacccatggtgacatggaccagaacactagggacatcatcatgagggagttccgatctggttcttcccgtgtgctcattaccacggaccttcttgcccgtggtattgatgtccagcaggtgtcccttgtcatcaactatgatctgccgacccaacctgagaactacctgcatcgcattggtcgtagtggtcgttttggtaggaaaggtgttgccattaactttgtgacccgtgacgatgagaggatgctgtttgacatccagaggttctacaatgtggtgattgaggagctgccggccaacgtcgctgaccttctgtgatcaagttcagaagagttatgttaaggggcctgataaggattgtttttgtctgaagtatcactgtcttatctggggggggggggagtgataaaggtgggggttctgttttaaaagtcactgtggtcgtagacaatttccaaatttttatgccatgttatgggaatttttgtagttgctaggctgtgctatgtgctggtgaggagggaggagtcttttacttttattatatctattgttaaaactatgtatgaccgaatgatgttatttatttgtgtcatggttgactatttgccatatgtattctgccaccggtcctgctactgccactggtatctcgagtgaaaactgtttgctcctcggtgcaataagccagataacatgtcacctaccggaatgccgttgatgtctagtgatgttttatctgttgatatgcatgtttggttggatacttgcctggacgattataataattttttgagatgttggcttcattttggtgagtg

SEQ ID NO: 303 - protein, 414 aa, Oryza sativa
MAGMAPEGSQFDAKHYDSKMQELLNQGETEEFFTSYDEVHESFDDMGLQENLLRGIYAYGFEKPSAIQQRGIVPFCKGLDVIQQAQSGTGKTATFCSGILQQLDYAVVECQALVLAPTRELAQQIEKVMRALGDYLGVKVHACVGGTSVREDQRILASGVHVVVGTPGRVFDMLRRQSLRPDYIKMFVLDEADEMLSRGFKDQIYDIFQLLPSKIQVGVFSATMPPEALEITRKFMNKPVRILVKRDELTLEGIKQFYVNVEKEEWKLDTLCDLYETLAITQSVIFVNTRRKVDWLTDKMRGRDHTVSATHGDMDQNTRDIIMREFRSGSSRVLITTDLLARGIDVQQVSLVINYDLPTQPENYLHRIGRSGRFGRKGVAINFVTRDDERMLFDIQRFYNVVIEELPANVADLL

SEQ ID NO: 304 - DNA, 1836 bp, Oryza sativa
gtcgggtcccctttataacctctctctctctttctctctctctcctcccaaaccctcaatcgtcgcatcgcctcctcctcctctcgccgctcgcagcgaaaaagccagcgcctcccagcgcccacgcgatcccgacgaatcgaatcgagtccgagacgccgatctcggattcgagaccgttgatttcaaccaacacaagccctcctccggatcgatccgctcctcttcagccatggcaggaatggcacccgaaggctcccagtttgatgctaagcactatgacagcaagatgcaggaactactgcaccaaggtgacaatgaggaattcttcacttcatatgatgaagtttttgagagttttgatgacatgggcctccaagagaaccttctcagaggcatctatgcttatggttttgagaagccatcagctattcagcaaagggggattgttcccttctgcaaagggcttgatgtgattcagcaggctcaatctggaacaggaaaaactgctaccttctgttctgggatcctgcagcaacttgactatggattggtggagtgccaatccctggtccttgcaccaacacgtgagcttgcccagcaaattgaaaaggtcatgcgtgctcttggtgactacttaggtgtcaaggtgcatgcctgtgttggtggaacctctgtccgtgaggaccaaaggattcttgctagtggtgtgcatgttgttgttggcacacctggacgtgtgtttgacatgctacgtcggcaatctctccgcccagaccacattaagatgtttgtgctggatgaagctgatgagatgctctcccgtggtttcaaggatcagatctatgatatcttccagctccttccaccaaagatccaggtcggagtgttctctgctaccatgcctcctgaggcccttgagatcacccgcaagttcatgaacaagcccgtgaggattcttgtgaagagagatgagcttacccttgagggtatcaagcaattctacgtcaatgtggagaaggaagattggaagctcgacactctttgtgacttgtatgagacactggccatcacccagagtgtcatctttgtgaacacccgccgcaaggtggactggctcaccgacaagatgaggagcagggaccacactgtctctgccacacatggagacatggaccagaacactagggacatcatcatgagggagttccgatctggttcttcccgtgtgcttatcaccactgatctgcttgctcgtggtatcgatgtccagcaagtctcccttgtcatcaactacgacctgcccacccagcctgagaactacctccatcgcattggtcgtagtggtcggtttggcaggaagggagttgccattaactttgtcacccgcgatgatgagaggatgctgttcgacatccagaggttctacaatgtgaccatcgaggagctgccggccaacgtcgctgaccttctctagattatgtcttaggaagtaaggttctggataaaagtttgtttttgtttttgttttaatatgaccaactttctcgtttgggaggagtggtaaggacggggtctatttgaattgtggttaaggacggcttccatgtttttctcttttccgtatgcaactatgtttggaaatttttgtagctgttaggctgtgctgcttcctgggctagctgggagagggagacactactggaatatttactttctttattaagctatgcttgccttgtgttattattccaatctgctcttacattcttcagctgtttgcaatccgtacaaattttgttcttattggtaatgtgaaatctaacttgtttcgag

SEQ ID NO: 305 - protein, 414 aa, Oryza sativa
MAGMAPEGSQFDAKHYDSKMQELLHQGDNEEFFTSYDEVFESFDDMGLQENLLRGIYAYGFEKPSAIQQRGIVPFCKGLDVIQQAQSGTGKTATFCSGILQQLDYGLVECQSLVLAPTRELAQQIEKVMRALGDYLGVKVHACVGGTSVREDQRILASGVHVVVGTPGRVFDMLRRQSLRPDHIKMFVLDEADEMLSRGFKDQIYDIFQLLPPKIQVGVFSATMPPEALEITRKFMNKPVRILVKRDELTLEGIKQFYVNVEKEDWKLDTLCDLYETLAITQSVIFVNTRRKVDWLTDKMRSRDHTVSATHGDMDQNTRDIIMREFRSGSSRVLITTDLLARGIDVQQVSLVINYDLPTQPENYLHRIGRSGRFGRKGVAINFVTRDDERMLFDIQRFYNVTIEELPANVADLL

SEQ ID NO: 306 - DNA, 1365 bp, Acacia aestivalis
actttcaacagcagtcatggcgggattagcacctgaaggatctcaatttgatgcacgacaatttgatagcagaatgaatgaattgctaacctcagatggaaacgacttctttacatcttatgatgaggtttatgagagtttcgatgctatgaaccttaaagagaaccttctgaggggaatatacgcatacggtttcgagaagccatctgcaattcaacaaaggggaattgtccccttcaccaagggcctcgacgtcattcaacaagcacaatctggaactggaaagacagcaactttctgctctggagttcttcaacaactcgactacgaggtggttgaatgccaagccttggttctcgcaccaactcgtgagctcgctcaacaaatcgaaaaagtcatgcgagcactcggtgattatctgggcgtcaaagtccatgcttgtgttggtggaaccagtgttagggaagatcaacgtattcttcaaggaggtgttcatgtagttgtcggaacacctggtcgtgttttcgacatgttgagaagacaatcacttcgtcctgattacatcaagatgtttgttttggacgaggctgatgaaatgctctcccgtggtttcaaggatcagatctacgacattttccaactccttccatccaaagtccaagtgggtgtcttctccgccacaatgcctccagaagctcttgaaataacccgaaaattcatgaacaaacctgttcgaatccttgtcaagcgtgacgagcttactcttgaaggtatcaagcaattccatgtcaacgttgagaaagaagaatggaaactcgaaactctctgtgacctctacgaaaccctagcaatcactcaaagtgtcatcttcgtcaacactcgccgaaaggtggattggcttacagacaagatgcgtggtcgtgaccacacagtctcagccactcacggagacatggatcaaaacactagagacatcatcatgagggagtttcgatctgggtcttctcgtgtactcatcactactgatcttcttgctcgtggtattgatgttcagcaggtttcattggttatcaactatgatttaccaactcaacctgagaattatcttcatcgtattggtcgaagtggaaggtttgggagaaagggagttgctattaactttgtgactagggacgatgaaaggatgttgtttgatatccagaagttctataatgttgttatcgaggagctcccatccaacgttgctgatcttctttgaagaggtttcttttttcgttttgtttgtttcttggtatatttatatgtgccttgttttgttgggtcttaaagtactttatttattttgtgttcggttttgttgagtag

SEQ ID NO: 307 - protein, 413 aa, Acacia aestivalis
MAGLAPEGSQFDARQFDSRMNELLTSDGNDFFTSYDEVYESFDAMNLKENLLRGIYAYGFEKPSAIQQRGIVPFTKGLDVIQQAQSGTGKTATFCSGVLQQLDYEVVECQALVLAPTRELAQQIEKVMRALGDYLGVKVHACVGGTSVREDQRILQGGVHVVVGTPGRVFDMLRRQSLRPDYIKMFVLDEADEMLSRGFKDQIYDIFQLLPSKVQVGVFSATMPPEALEITRKFMNKPVRILVKRDELTLEGIKQFHVNVEKEEWKLETLCDLYETLAITQSVIFVNTRRKVDWLTDKMRGRDHTVSATHGDMDQNTRDIIMREFRSGSSRVLITTDLLARGIDVQQVSLVINYDLPTQPENYLHRIGRSGRFGRKGVAINFVTRDDERMLFDIQKFYNVVIEELPSNVADLL

SEQ ID NO: 308 - DNA, 1323 bp, Allium cepa
gaaaatggcaggaatggcagaagagggttctcaatttgatgctaaaaaatttgattcaaaaatgaatgacctgcttacagcagatgggcaggatttctttacgtcctatgatgaggtttatgatagcttcgattccatgggtcttcaggaaaatctactgagaggaatttatgcttatgggttcgagaaaccttctgcaattcaacagagaggaattgttccattctgcaagggacttgatgttattcaacaggctcaatcaggaactggaaaaactgcaaccttttgttctggaattttgcaacaacttgattacagcttgattgaatgtcaagctttagttcttgctccaactcgtgagcttgcacagcaaattgaaaaggtcatgagagctctaggagattaccttggtgtgaaagttcatgcttgtgttggaggaactagtgtccgtgaggatcaaaggattctctctagtggagtacatgtggttgttggcacaccaggtcgtgtttttgatatgttgaggaggcagtctctacgtccagattatattaaaatgtttgtgttggatgaggcagatgagatgctttcacgtggttttaaagaccagatatacgacatcttccaacttctcccagcaaaagtacaagtcggcgtcttctctgccaccatgcctccagaagccctagaaataacccgcaagttcatgaataaacccgtccgcatcctggtgaagcgggacgagctaaccctcgaaggcatcaagcaattctacgtgaacgtggaaaaggaagagtggaaacttgaaaccctgtgcgatctgtacgagaccctagccatcacccagagcgtcatattcgtgaacacccggcgcaaggtcgactggctcactgacaaaatgcgcagccgcgaccacaccgtctcagccacccatggcgacatggaccagaatacccgtgacatcatcatgcgcgagttcaggtccggttcctccagggttctcatcaccaccgacctccttgccgaaggcatcgatgtgcagcaagtcagtttggtcattaactacgacctgcccacacagcctgagaattacctgcaccgtatcggacgtagtggtaggtttgggaggaagggtgtggctatcaattttgttacgcttgacgatgagagaatgctttttgatattcagaagttttacaacgttgtcgtggaggagctgcctagtaatggtgccgatctcctttgaatattggtttcttccttttccctctttttataagccgggtttatttgcagacatttgcaaatttttgtagcctttgg

SEQ ID NO: 309 - protein, 413 aa, Allium cepa
MAGMAEEGSQFDAKKFDSKMNDLLTADGQDFFTSYDEVYDSFDSMGLQENLLRGIYAYGFEKPSAIQQRGIVPFCKGLDVIQQAQSGTGKTATFCSGILQQLDYSLIECQALVLAPTRELAQQIEKVMRALGDYLGVKVHACVGGTSVREDQRILSSGVHVVVGTPGRVFDMLRRQSLRPDYIKMFVLDEADEMLSRGFKDQIYDIFQLLPAKVQVGVFSATMPPEALEITRKFMNKPVRILVKRDELTLEGIKQFYVNVEKEEWKLETLCDLYETLAITQSVIFVNTRRKVDWLTDKMRSRDHTVSATHGDMDQNTRDIIMREFRSGSSRVLITTDLLAEGIDVQQVSLVINYDLPTQPENYLHRIGRSGRFGRKGVAINFVTLDDERMLFDIQKFYNVVVEELPSNGADLL

SEQ ID NO: 310 - DNA, 1629 bp, Aquilegia formosa x pubescens
tccttaactccacggcaaagatccgaggagttaggaaaccctaaccctaaacaaagctttctattactctttttcactttcttcttcttcagcaattttcaatcaagtttcaatcagcagtcatggcgggaatggcacaagaaggattacaatttaatgcacaacattatgatagcagaatgactgaagtgctctcttcggaagggcaagatttttttacatcgtatgatgaggttcacgaaagttttgatgctatgaatcttagggagaacctactgaggggaatctacgcatatggatttgagaagccttctgcgattcaacagaggggaattgtgcccttcaccaaggggcttgatgtaattcaacaagcgcagtctggaactgggaagacagcaactttctgctcagggattttacagcagcttgattttgaattggttgaatgtcaagccttggttctggcacctactcgtgagcttgcacaacagattgagaaggttatgcgggcacttggtgattatctgagcgtgaaagttcatgcttgtgtgggtggaacaagtgttcgtgaggatcagcacattctttcaaatggtgttcacgtagttgttgggacacctggtcgtgtttttgacatgttgaggagaaagtcactccgcgcggattacattaaaatgtttgtattggatgaggctgatgagatgctttcacgaggtttcaaggaccagatctacgacatttttcagcttcttcctgcaaaagttcaggttggtgttttctcagcaacaatgcctccagaagctcttgagatcacaaggaagttcatgaacaagcctgtaaggattctagtgaagcgtgacgagctcacccttgagggtatcaagcagttctatgtcaatgttgacaaagaagaatttaagctcgaaacactctgtgatctctatgagacattagccatcacccagagtgtcatttttgtgaatactcgtcggaaggttgactggcttactgacaagatgcgtggtcgtgatcatacagtctctgccacccatggagacatggaccagaacacaagggacatcatcatgcgagaattccggtctgggtcctctcgcgtgctcatcaccactgacctcttggcccgtggtattgatgttcagcaagtatccttggtaatcaactttgatcttcctactcaaccagaaaactatctccatcgtattggtcgtagtggacgttttggaagaaaaggtgttgccatcaactttgtgactcgggatgatgagaggatgttgtatgatatccagaaattctataacgtgcagattgaggagcttccatccaacgttggtgatcttctttaaagaggtttttttattggtatatctgagggcctttttctactgaagtactatttcttttgtttttcttgagtagttagttttggaattagcatctttggagaacttctttgactgtcagtatgactgacgttagcaatgagaaaaatcattcattgctcattttgaatattggtaaacatcagtggccgcaaattttgtccttttagtgatatgtaatctacacctccaatatcaaagtggtgatgccttttgttctccctgataa

SEQ ID NO: 311 - protein, 413 aa, Aquilegia formosa x pubescens
MAGMAQEGLQFNAQHYDSRMTEVLSSEGQDFFTSYDEVHESFDAMNLRENLLRGIYAYGFEKPSAIQQRGIVPFTKGLDVIQQAQSGTGKTATFCSGILQQLDFELVECQALVLAPTRELAQQIEKVMRALGDYLSVKVHACVGGTSVREDQHILSNGVHVVVGTPGRVFDMLRRKSLRADYIKMFVLDEADEMLSRGFKDQIYDIFQLLPAKVQVGVFSATMPPEALEITRKFMNKPVRILVKRDELTLEGIKQFYVNVDKEEFKLETLCDLYETLAITQSVIFVNTRRKVDWLTDKMRGRDHTVSATHGDMDQNTRDIIMREFRSGSSRVLITTDLLARGIDVQQVSLVINFDLPTQPENYLHRIGRSGRFGRKGVAINFVTRDDERMLYDIQKFYNVQIEELPSNVGDLL

SEQ ID NO: 312 - DNA, 1763 bp, Aquilegia formosa x pubescens
tcttcactcttctgcgtttctttaactccaccgaaggagttttggaaaccctaaaagcacaacaaaaaaagcaaacgaaacaaagctttctttcaatctctctctcttttaaatcttctttgctcgttcgttcgttttatctcaatcaatcaatctctaatcatggctggtttggcacccgaaggatcacagtttaatgctcaacaatatgattcaagaatggaactagttaatgctgatggacaagatttcttcacttcatatgatgaggttcatgagagttttgatgcaatgggtttgcaagagaaccttctgagaggcatctatgcatatggttttgagaagccctctgctatacagcaaaggggaattgtacccttctgtaagggtctcgatgtcatccaacaagcacagtctggaactggaaagacagccactttctgctctggaatcttgcagcagcttgattatagtctagttgaatgccaggcattggttctcgctccaactagagaacttgctcaacaaattgagaaggttatgcgtgcacttggagactatcttggtgtcaaggttcatgcatgtgttggtggaacaagtgttcgtgaggatcaacgcattctttctggcggggttcatgttgtagttggtactcctggccgtgtctttgacatgctgcgcagacagtcacttcgccctgattgcatcaaaatgtttgtattggatgaggcagatgagatgctttccagaggtttcaaggatcagatttatgacattttccagcttctgccctcaaaagttcaggtaggggtattctctgcaactatgccacctgaagcccttgagatcacaaggaaatttatgaacaagcctgtcagaattttggtgaagcgtgatgagctaacccttgagggtattaagcaattctatgttaatgttgacaaggaagagtggaaattggagactttgtgtgatctttatgagaccttggctattactcagagtgtcatctttgtaaatacgcgacggaaggttgattggttgaccgacaagatgaggggccgtgaccatactgtgtctgccactcatggagacatggaccagaatactagggatattatcatgcgtgaatttcgttctgggtcctcccgtgtgctcatcaccactgacctcttggctcgtggtattgatgtccagcaggtttctcttgtcataaattatgatcttcctacgcagccagagaactatcttcatcgtattggacgtagtggtcgatttggaaggaaaggtgttgctatcaactttgtgactcgtgatgatgaaagaatgctttttgacatccagaagttctataatgtggttattgaggagcttccatcaaatgttgctgatctcctctaatgaagctttttctcttggcatgttgaggtatgggcacttggagtttgttaagtgcactattttatgtggttatataggaagttgtcgtaatttagtggtgggtgcacctgactattgagtaatgttggtccctatttgcaatagagtgcttgcccattttcgctgtgtggcatcaatttattgcaagcttagtcgcaacttggggttctgtatcgtatgctttccttttataccccaaaagggaaggtagcttggatttattttatttcttttccccaaggtgtggttatcttttgttttgttttttttatctttttctttttaattttgtttttcattttgagagattggtatgtagaatg

SEQ ID NO: 313 - protein, 412 aa, Aquilegia formosa x pubescens
MAGLAPEGSQFNAQQYDSRMELVNADGQDFFTSYDEVHESFDAMGLQENLLRGIYAYGFEKPSAIQQRGIVPFCKGLDVIQQAQSGTGKTATFCSGILQQLDYSLVECQALVLAPTRELAQQIEKVMRALGDYLGVKVHACVGGTSVREDQRILSGGVHVVVGTPGRVFDMLRRQSLRPDCIKMFVLDEADEMLSRGFKDQIYDIFQLLPSKVQVGVFSATMPPEALEITRKFMNKPVRILVKRDELTLEGIKQFYVNVDKEEWKLETLCDLYETLAITQSVIFVNTRRKVDWLTDKMRGRDHTVSATHGDMDQNTRDIIMREFRSGSSRVLITTDLLARGIDVQQVSLVINYDLPTQPENYLHRIGRSGRFGRKGVAINFVTRDDERMLFDIQKFYNVVIEELPSNVADLL

SEQ ID NO: 314 - DNA, 2176 bp, Asparagus officinalis
ggcaaagaactctctttccggcgactaaagcagcggctgctttttctctctctttcgatctcgctctcgactgcgatcaacaatcaaacatggcaggcttggcaccagaaggctctcaattcgatgctcgtcaatatgattccaaaatgaatgatctgctcggtggcgatggacaagatttcttcacttcgtatgatgaggtgtatgaaagttttgatgatatgggtcttcaagagaatcttcttagaggaatttacgcttatggttttgagaaaccatctgcaatccagcaaaggggtattgttcccttctgcaaggggcttgacgttatacaacaagcacagtcgggcacaggaaagactgcaaccttctgttctggaatccttcaacagcttgactatggtgtggttgaatgccaggccttggtccttgctcctactcgagaactggcacagcaaattgaaaaggtcatgcgagcactgggtgattaccttggggtaaaagttcatgcttgtgttggaggaacaagtgtccgtgaagatcagcgtattctttcaagtggggttcatgttgttgttggcacacctggtcgtgtgtttgacatgttaaggaggcaatccctccgccctgattacattaagatgtttgttctcgcaatgagtgctgatgaaatgctttcacgtggtttcaaggaccagatctacgatatcttccagcttctaccctcaaaagttcaggttggagtcttctctgccacaatgccccctgaggcccttgaaataacccgcaagttcatgaacaagcccgtgagaattctcgtgaagagagatgaactcactctggagggtatcaagcagttctacgtcaatgtcgagaaggaagaatggaagctagaaaccctctgtgacctctacgaaaccctcgctatcacacagagtgtgatctttgtgaacactcgtcgcaaggttgactggctcaccgacaagatgaggagcagggatcacactgtctcagccactcatggtgacatggaccagaacacccgagacattatcatgcgcgagttccgttctggttcatcccgtgttttaattaccactgatctccttgctcgcggtattgatgttcagcaggtgtcgctggttatcaactatgatctccctacccaacccgagaactatctccatcgtattggacgtagtggacgatttgggcgaaagggtgttgctatcaactttgtgactcgtgatgatgagaggatgctctttgatatccagaagttttacaatgtggtggttgaggagcttccctctaatgtcgcagatctcctgtgaggaaaactctcttttgcactgggaagtgctttgatacttaaacaagcttggtctaggtatttttatttgaatttatgcttaatcctatgaaacttgtttaatttttagccgtaaagttgcatgttctgggttttttttgtagcgtattagcgcgtgttgtatgtgccttgataaccttatacagggttgctttgggtttttttggtcttgggtcttgtttgacgctcgtctgttattttatttctgtagcctggagtctttgtgggttgaattatttatgcatctagtagtttagaactgtgaatcaaatctcgatccgcacccgaaagttcatgaccaaccgcctcctctctcgcaaacaattcgtcattgatgttaatcaccctggaaaggccaatgtctccaaggcggagttgaagcagaggttagcgactttgtacgatgttaaggatccgaactcgatcttcgtgttcaagttcaggactgcttttggaggcgggaagtcaactgggtttggattgatttacgattctgttgagagtgcgaagaagttcgagcccaagtatcgtctcattaggaatggattggctacaaaggttgagaagtctaggaagcagatgaaggaaagaaagaacagagcaaagaagatccgtggtgtgaagaagacaaaggccggagatgctgcaaagggtggaaagaagaaatgaggaatcattggctctatcatgatcatgatgttctatcatagttttgtttgattaagttttggtttggaccgagtttattcacattacattgtgccttacggtttatatttaaaaattctatgctaatgtgcttcc

SEQ ID NO: 315 - protein, 414 aa, Asparagus officinalis
MAGLAPEGSQFDARQYDSKMNDLLGGDGQDFFTSYDEVYESFDDMGLQENLLRGIYAYGFEKPSAIQQRGIVPFCKGLDVIQQAQSGTGKTATFCSGILQQLDYGVVECQALVLAPTRELAQQIEKVMRALGDYLGVKVHACVGGTSVREDQRILSSGVHVVVGTPGRVFDMLRRQSLRPDYIKMFVLAMSADEMLSRGFKDQIYDIFQLLPSKVQVGVFSATMPPEALEITRKFMNKPVRILVKRDELTLEGIKQFYVNVEKEEWKLETLCDLYETLAITQSVIFVNTRRKVDWLTDKMRSRDHTVSATHGDMDQNTRDIIMREFRSGSSRVLITTDLLARGIDVQQVSLVINYDLPTQPENYLHRIGRSGRFGRKGVAINFVTRDDERMLFDIQKFYNVVVEELPSNVADLL

SEQ ID NO: 316 - DNA, 1759 bp, Arabidopsis thalliana
ggaaagtgggggtaaagttggaaatataaaaattttggaaaagtagaacaattagaaagaggaaaaccctaaaaaaaaaaagagggggactatataactggctaacacgtattgggttgagtctctctctacctcaatttatattatttgcttcaatcttctctttatcgctccaccagatccaagttcgcgagatttcaagctctctaacaaagttcttcacttttactctcaaagctttcatctttcattcaactacttaagctccaagtatggcaggatccgcaccggaaggaacacaatttgatacgcgtcagtttgaccagaggctgaatgaagttctcgatggacaggatgagttcttcacctcatatgatgaggtccatgagagctttgatgccatgggtttgcaagagaatcttcttaggggtatctatgcttacggtttcgaaaagccttctgctattcagcaaagaggaattgtacccttttgcaagggtcttgatgtgatccagcaggcacagtctggtactggaaaaaccgccactttctgctctggtgtcttgcagcagcttgactatgcccttctccagtgccaggctctcgttttggctcccaccagagagcttgctcagcagattgagaaggtcatgcgtgcccttggtgactaccaaggtgtcaaggttcatgcctgtgttggtggaaccagtgtccgtgaggatcagcgcattctccaggctggtgttcatgttgtcgttggaactcccggtcgtgtttttgacatgcttagaagacaatctctccgccctgactgcatcaagatgtttgtccttgatgaagctgatgaaatgctctcccgtggtttcaaggatcagatctatgacatattccagcttctcccaccaaagattcaggttggagtgttctctgcgacaatgcctccggaagctttggagatcacaagaaaattcatgagcaaaccagtgagaatcttggtgaaacgtgatgagctcacacttgaaggtatcaagcaattctacgtgaacgtggagaaagaagactggaagcttgagactctctgcgatctctacgagactctagccatcactcagagtgtcatctttgtcaacactcgtcgcaaggtcgactggctcacagacaaaatgagaagccgtgaccacacagtctcagcaactcatggagacatggaccaaaacaccagagacatcatcatgagagagttcaggtctggctcgtctcgtgttctaatcacaaccgatctcttggctcgtggtatcgatgtgcagcaagtctctctagtcataaactttgacctcccaactcagccagagaattaccttcaccgtatcggaagaagtggaaggttcgggagaaagggtgtggcgattaactttgtgactcttgatgatcagagaatgctgtttgatattcagaaattctacaatgtggttgttgaggagcttccctcaaacgtggctgatttgctgtgaagaagaagaagaagaagaagaagaaaggttgcttgtttcgcaaatttcttatttgatttttgacccgtctctctctctctgaatcatcgatacatctttttcattctctagtattcttcatcaactctatcgaacatatatatgtctcttctgaccatatttcttttttatcaaatgcaatatttatttcttctcttgtatgatccaaaaatctttcgtaattacaagtctattcacagcaattctat

SEQ ID NO: 317 - protein, 412 aa, Arabidopsis thalliana
MAGSAPEGTQFDTRQFDQRLNEVLDGQDEFFTSYDEVHESFDAMGLQENLLRGIYAYGFEKPSAIQQRGIVPFCKGLDVIQQAQSGTGKTATFCSGVLQQLDYALLQCQALVLAPTRELAQQIEKVMRALGDYQGVKVHACVGGTSVREDQRILQAGVHVVVGTPGRVFDMLRRQSLRPDCIKMFVLDEADEMLSRGFKDQIYDIFQLLPPKIQVGVFSATMPPEALEITRKFMSKPVRILVKRDELTLEGIKQFYVNVEKEDWKLETLCDLYETLAITQSVIFVNTRRKVDWLTDKMRSRDHTVSATHGDMDQNTRDIIMREFRSGSSRVLITTDLLARGIDVQQVSLVINFDLPTQPENYLHRIGRSGRFGRKGVAINFVTLDDQRMLFDIQKFYNVVVEELPSNVADLL

SEQ ID NO: 318 - DNA, 1667 bp, Arabidopsis thalliana
aagcaaagtaaaacctaaaaaaaaaaaaagaccgtaagtagttacaagggtggaagtataaaggagcagtcttttcttcttctttcaaccccacggcgcagatcctacgagtttggtctttgtctctatcttttcaatctttctctctcaatcgctcttcaatttgataacagcaaagtcatggcaggaatggcatctgatggaactcaatatgatcctcgtcagtttgatactaagatgaatgccattctcggcgaggaaggagaggaaacattctacactaactatgacgaagtttgcgacagctttgatgcaatggaattgcaaccagatcttctcaggggtatttatgcttacggtttcgagaagccttctgctattcagcaaagaggaattattccattctgcaagggtcttgatgtgatccagcaagctcaatctggaactggaaagaccgctaccttttgctctggtgttttacagcagctcgatattagtttggttcaatgccaagctcttgttttggcacctacccgagaacttgcccagcaaattgaaaaggttatgagggcacttggtgactaccttggcgtcaaggctcaggcttgtgttggtggaacaagtgttcgtgaggatcaacgtgttcttcagtctggtgttcatgttgttgttggaacccctggtcgtgtctttgacttgttacgcagacaatccctccgtgctgatgcaatcaaaatgtttgttcttgatgaagctgatgaaatgctctctcgtggtttcaaggatcagatatacgacatcttccagcttcttccttccaaggttcaggttggtgttttctctgctacaatgcctcccgaagcccttgagatcacaaggaagttcatgaacaaaccagtcaggattctggtcaagcgagacgagctgactcttgaaggtatcaagcagttttatgtcaatgtagacaaggaagagtggaaactcgagacactatgcgatctctacgagacactggccatcactcaaagcgtcatctttgtgaacacaaggcgtaaggttgattggctaaccgacaaaatgagaagccgtgaccacactgtttcagctacacacggagacatggaccagaacacaagagacatcatcatgcgcgaattccgctctgggtcttcccgtgtcctcataaccactgacctccttgctcgtggtatcgatgttcagcaagtctctctggtcataaactttgacctcccaacccaaccggagaattaccttcatcgtattggaagaagtggaaggtttgggagaaagggagtagcaatcaatttcatgacatcggaggatgagagaatgatggctgatattcagaggttttacaatgtggtcgttgaggagttgccaagcaatgttgctgatcttctctgaagcctttcttttttctgttttttactgagaaagtgctgtgtttacccctttttttggcagcttctctatgctttgatttttgttttcaggctactacttagatttatagttcttggctaaaagcgaacataactcattacatgattttgcttttttggcaatcaagaatttcggcattatttatctttttgtgaacgtggcttacaaggaaggatactctatgagactaaagacttttctct

SEQ ID NO: 319 - protein, 414 aa, Arabidopsis thalliana
MAGMASDGTQYDPRQFDTKMNAILGEEGEETFYTNYDEVCDSFDAMELQPDLLRGIYAYGFEKPSAIQQRGIIPFCKGLDVIQQAQSGTGKTATFCSGVLQQLDISLVQCQALVLAPTRELAQQIEKVMRALGDYLGVKAQACVGGTSVREDQRVLQSGVHVVVGTPGRVFDLLRRQSLRADAIKMFVLDEADEMLSRGFKDQIYDIFQLLPSKVQVGVFSATMPPEALEITRKFMNKPVRILVKRDELTLEGIKQFYVNVDKEEWKLETLCDLYETLAITQSVIFVNTRRKVDWLTDKMRSRDHTVSATHGDMDQNTRDIIMREFRSGSSRVLITTDLLARGIDVQQVSLVINFDLPTQPENYLHRIGRSGRFGRKGVAINFMTSEDERMMADIQRFYNVVVEELPSNVADLL

SEQ ID NO: 320 - DNA, 1804 bp, Arabidopsis thalliana
taaagacggagtatataaacaaggtaacgcgttttctctcagcctctttcggatattccaccagtctctcgcaatcttcgctcttctctttgctctctctctctcaacgcggttcagatccgagtttgggagattcaagctccctgaaaaaagccctttactctcgcttaccaactttgctccagcatggcaggatctgcaccagaaggcacacagtttgatgcacgtcagtttgaccagaaactcaatgaagtacttgagggacaagatgagttcttcacatcctatgatgatgttcatgagagctttgatgccatgggtcttcaagagaaccttctcaggggtatttatgcttatggttttgagaagccttctgctattcagcaaagaggaatcgtccccttctgtaagggtcttgatgtgattcaacaggctcagtctggtactgggaaaacagcaactttctgctctggtgtcttgcagcagctggacttctcccttatccagtgtcaggctttggttctagctccaactagagagcttgctcagcaaattgagaaggtcatgagggcccttggtgattaccttggtgtcaaggttcacgcctgtgttggtggaaccagtgtccgtgaggatcagcgcatcctccaagctggtgtccatgttgttgttggaactccagggcgtgtctttgacatgttgaagaggcagtctcttcgtgctgacaacatcaagatgtttgttctcgatgaagctgatgaaatgctctcccgtggtttcaaggaccagatctatgacatattccagcttcttccaccaaagatccaagttggtgtgttctccgcaacaatgccaccagaagctcttgagatcacaaggaagttcatgagcaagccagtgagaatcttggtgaagcgtgatgagcttacccttgaaggtatcaagcagttctacgtcaacgttgagaaagaagagtggaagctcgagacactctgtgatctctacgagactcttgccatcactcagagtgtcatcttcgtgaacaccaggcgtaaggttgattggctcacagacaaaatgagaagccgtgaccacacagtctctgcaactcacggagacatggaccagaacaccagggacatcatcatgagagagttcaggtctggttcctcccgtgttctcatcaccactgacctcttagctcgtggtattgatgtccaacaagtctccctggttatcaacttcgatctcccaactcagccagagaactaccttcaccgtatcggaagaagtggaaggttcgggagaaagggtgttgcgatcaatttcgtgacccgtgatgatgagaggatgctgtttgatattcagaaattctacaatgtggttgtcgaagagctgccttcgaacgtggccgatctgctgtgaagggagaaaagaagtcggttctgttgctgtgtttgctctgccgtactagtatcaccggagaagaaaggttttcttgttttgcaaggcactctttgatctgattttgacccgtcgtctatcagcgatttacatttcttaaattttcttagttgttgttctctcctctctctcccagctacgaacatatctctctcttcttgaccatttttaagtttaagtcatatggagtatttatttcttcactattttaatattcggctttgttgtttgtctttgatttttgtatcaatcaaatcttttcatcaaagtttggttttaagctttttcaaatctatatctcagcattaaacttattttatatgtttatgtcaaactggtt

SEQ ID NO: 321 - protein, 412 aa, Arabidopsis thalliana
MAGSAPEGTQFDARQFDQKLNEVLEGQDEFFTSYDDVHESFDAMGLQENLLRGIYAYGFEKPSAIQQRGIVPFCKGLDVIQQAQSGTGKTATFCSGVLQQLDFSLIQCQALVLAPTRELAQQIEKVMRALGDYLGVKVHACVGGTSVREDQRILQAGVHVVVGTPGRVFDMLKRQSLRADNIKMFVLDEADEMLSRGFKDQIYDIFQLLPPKIQVGVFSATMPPEALEITRKFMSKPVRILVKRDELTLEGIKQFYVNVEKEEWKLETLCDLYETLAITQSVIFVNTRRKVDWLTDKMRSRDHTVSATHGDMDQNTRDIIMREFRSGSSRVLITTDLLARGIDVQQVSLVINFDLPTQPENYLHRIGRSGRFGRKGVAINFVTRDDERMLFDIQKFYNVVVEELPSNVADLL

SEQ ID NO: 322 - DNA, 1478 bp, Brasssica napus
ggatatctattatctcttaacctcaattctcttaagaagatcttttacttttgctcttaatcaacctcaaagtcatggcaggatcggcaacacagtttgatgatgcgcgtcagtttgatcaggcactcagtgaaatcctggagggacacgatgagttcttcacctcctatgatgaggtttatgagagttttgatggcatgggtttgcaagagaaccttcttaggggtatctatgcttatggttttgaaaagccttctgctattcagcaaagaggaatcgtacccttttgcaagggtcttgatgtgatccagcaggcacagtctggtactggaaaaaccgcaactttctgttctggtgtcttgcagcagcttgacgtcacccttgtccagtgccaagctctggtcttggctcccaccagggagcttgctcagcagattgagaaggtcatgcgtgctctcggagactacattggcgtcaaggttcatgcctgtgttggtggtaccagtgttcttgacgataagcgtatcctccaagctggtgtccatgttgttgttggaactccaggtcgtgtctttgacatgctccaaagacagtcacttcgctctgactgtataaagatgtttgtccttgatgaagctgatgaaatgctctcccgtggtttcaaggatcagatctatgacatattccagcttctcccaccaaagattcaagtaggagtgttctcagctacaatgccaccagaagctctcgagatcacaaggaagttcatgagcaaaccagtgagaatcttggtgaaacgtgacgagctaacacttgaaggtatcagacagttctacgtggacgtggacaaagaagagtggaaattcgaaactctctgtgacctctacgagacattagccatcactcagagtgtcattttcgtcaacactcgtcgcaaagttgactggctcacagaaaaaatgagaagccgtgaccacacagtctcagccactcacggagatatggaccaaaacacgagagacatcatcatgagagagttcaggtctggttcttctcgtgttctcatcacaaccgatctcttggctcgtggtattgacgtgcagcaagtgtctctggtcatcaactttgaccttccaactcagccagcgaattaccttcaccgtatcggaagaagtggaaggtttgggaggaaaggtgcggcgattaactttgtgactcgtgatgatgagaaaatgcttgctgatatccagaagttttacaatatggttgttgaggagcttccatcaaacctagctgatctgctttgaacccttgtttcgctgatgaagaataaaaggttacttgttttgcaaggttcttgtttggttttctatccatctgtcttctcttaaagtatattttaccaactctttggaacatatgtctcgtctgactaaccttcatcttcatctcatgcaataatatttttagtttctgtt

SEQ ID NO: 323 - protein, 410 aa, Brasssica napus
MAGSATQFDDARQFDQALSEILEGHDEFFTSYDEVYESFDGMGLQENLLRGIYAYGFEKPSAIQQRGIVPFCKGLDVIQQAQSGTGKTATFCSGVLQQLDVTLVQCQALVLAPTRELAQQIEKVMRALGDYIGVKVHACVGGTSVLDDKRILQAGVHVVVGTPGRVFDMLQRQSLRSDCIKMFVLDEADEMLSRGFKDQIYDIFQLLPPKIQVGVFSATMPPEALEITRKFMSKPVRILVKRDELTLEGIRQFYVDVDKEEWKFETLCDLYETLAITQSVIFVNTRRKVDWLTEKMRSRDHTVSATHGDMDQNTRDIIMREFRSGSSRVLITTDLLARGIDVQQVSLVINFDLPTQPANYLHRIGRSGRFGRKGAAINFVTRDDEKMLADIQKFYNMVVEELPSNLADLL

SEQ ID NO: 324 - DNA, 1551 bp, Brassica oleracea
  misc_feature (1532)..(1532): n is a, c, g, or t
ctcaatcttcgctctctctttctctcgctcgttgtctttctcactttcgcggtttagatctgagtttggggagatacaagctcccctaagttaacaacaaagcactctactttcgcttccttcagctaccaaatcaatttctctccagtcatggcaggatccgcaccagaaggcacacagtttgatgctcgtcagttcgaccagaagcttaacgaagttctcgagggacaagatgagttcttcacctcttacgacgaggttcacgacagcttcgacgtcatgggactccaagagaatctcctcagaggcatttacgcttacggttttgagaagccatctgcaatccagcaaagaggaatcgtcccgttctgcaaaggcctcgacgtgatccaacaagcccaatctggaacgggcaaaaccgccaccttctgctccggcgtcctccagcagctggacttcgccatcgtccagtgccaagccctcgtcctcgctccaaccagagagctcgcccagcagatcgagaaggtcatgagggcactcggcgactacctcggcgtcaaggtccacgcctgcgtcggcgggaccagcgtccgcgaggaccagcgcatcctccaggccggcgttcacgtcgttgtcggcaccccggggcgtgtcttcgacatgctgaagcgccagtccctccgcgccgacaacatcaagatgtttgttcttgacgaggccgacgagatgctctcccgcgggttcaaggaccagatctacgacatcttccagcttctcccaccaaagatccaagtcggcgtcttctcggcgaccatgcccccggaggctctcgagatcacgaggaagttcatgagcaagccggtgaggatcctggtcaagcgcgacgagctgaccttggaaggtatcaagcagttctacgtcaacgttgagaaggaggagtggaagctcgagacgctctgcgacctctacgagacgctcgccatcactcagagcgtcatcttcgtgaacacgaggaggaaggtggactggctcaccgacaagatgagggggcgtgaccacacggtctcggcgactcacggagacatggaccagaacacgagagacatcatcatgagggagtttaggtccgggtcctcgcgtgtgctcatcaccactgatctcttggctcgtggtatcgatgttcagcaggtgtctttggttatcaactacgatctgccgactcagcctgagaactaccttcaccgtatcggaagaagtgggaggtttgggaggaaaggtgtggcgatcaactttgtgaccaaggatgatgagaggatgctgtttgatatccagaagttttacaacgtggttgttgaggagcttccttccaacgttgctgatctgctttgaggaagaagaaaaggtctctttcttgttacacaaggcactctttgatctgattttgatacctattctctttccatcagcgtttattgttatatctctttaaatttctaagaacgtatctctctttgtgacaatttttatttctntaatcatatggagtatttt

SEQ ID NO: 325 - protein, 412 aa, Brassica oleracea
MAGSAPEGTQFDARQFDQKLNEVLEGQDEFFTSYDEVHDSFDVMGLQENLLRGIYAYGFEKPSAIQQRGIVPFCKGLDVIQQAQSGTGKTATFCSGVLQQLDFAIVQCQALVLAPTRELAQQIEKVMRALGDYLGVKVHACVGGTSVREDQRILQAGVHVVVGTPGRVFDMLKRQSLRADNIKMFVLDEADEMLSRGFKDQIYDIFQLLPPKIQVGVFSATMPPEALEITRKFMSKPVRILVKRDELTLEGIKQFYVNVEKEEWKLETLCDLYETLAITQSVIFVNTRRKVDWLTDKMRGRDHTVSATHGDMDQNTRDIIMREFRSGSSRVLITTDLLARGIDVQQVSLVINYDLPTQPENYLHRIGRSGRFGRKGVAINFVTKDDERMLFDIQKFYNVVVEELPSNVADLL

SEQ ID NO: 326 - DNA, 1582 bp, Brassica oleracea
gacctacctttcgctcttttcttttttagtttatctctttacgattcgcttcagatccgagcttggaagatttcaagctctctctaagaaagtctcacactttttgttcccgaatcaatctcccaagtcatggcaggatcagcaccagaaggcacccagtttgatactcgtcagtttgaccagaggctcaatgaagtccttgagggacaggatgagttcttcacctcctatgatgaggtccatgagagctttgatgccatgggtttgcaagagaaccttcttaggggtatctatgcctatggttttgaaaagccttctgctattcagcaaagaggaatcgttcccttttgcaagggtcttgatgtgatccagcaggctcagtctggtactggcaaaaccgccactttctgctctggtgtcttgcagcagctcgacttctcccttgtccagtgccaggctctcgtctttggctcccacccagagagctttgctcagcagatcgagaaggtcatgcgtgctctcggagactaccttggcgtcaaggtccatgcttgtgttggtggaaccagtgtccgtgaggatcagcgtatcctccaggccggtgtccatgttgtcgttggaactcccggtcgtgtctttgacatgctccgaagacagtctcttcgctccgacagcatcaagatgtttgtccttgatgaagctgatgagatgctctcccgtggtttcaaggaccagatctacgacatattccagcttctcccaccgaagattcaggtcggagtgttctcagccacgatgccgccagaggctctcgagatcacaaggaagttcatgagcaaaccggtgaggatcctggtgaagcgagacgagctcaccctcgaaggtatcaagcagttctacgtgaacgtggagaaggaagagtggaagctcgaaactctctgtgacctctacgagaccttagccatcactcagagcgtcatcttcgtcaacactcgccgcaaggtggactggctcactgacaaaatgaggagccgtgaccacacggtctcagcgactcacggagacatggaccaaaacacgagagacatcatcatgagagagttcaggtctggctcttcccgtgtcctcatcacgacagatctcttggctcgtggtatcgatgtgcagcaagtgtctctggtcatcaactttgacctcccgactcagccggagaattaccttcaccgtatcggaagaagtggaaggtttgggaggaaaggtgtggccattaactttgtgacgaaggatgatgagagaatgctttttgatattcagaaattctacaatgttgttgttgaggagcttccctcaaacgttgccgatctgctttgaagaagaaaggaaaaccaccgttgaagaagaagaagaataggttacttgtttcgcaagcttcttattttgatttttgacccaactttctctgtttctctctctctttactcatcgatacctctcgtctcattttcgaacatatatatgtctcatctgaacatgtttcttcttaatctcatgcaatatttatttattttctcgtttgatgcac

SEQ ID NO: 327 - protein, 413 aa, Brassica oleracea
MAGSAPEGTQFDTRQFDQRLNEVLEGQDEFFTSYDEVHESFDAMGLQENLLRGIYAYGFEKPSAIQQRGIVPFCKGLDVIQQAQSGTGKTATFCSGVLQQLDFSLVQCQALVFGSHPESFAQQIEKVMRALGDYLGVKVHACVGGTSVREDQRILQAGVHVVVGTPGRVFDMLRRQSLRSDSIKMFVLDEADEMLSRGFKDQIYDIFQLLPPKIQVGVFSATMPPEALEITRKFMSKPVRILVKRDELTLEGIKQFYVNVEKEEWKLETLCDLYETLAITQSVIFVNTRRKVDWLTDKMRSRDHTVSATHGDMDQNTRDIIMREFRSGSSRVLITTDLLARGIDVQQVSLVINFDLPTQPENYLHRIGRSGRFGRKGVAINFVTKDDERMLFDIQKFYNVVVEELPSNVADLL

SEQ ID NO: 328 - DNA, 1720 bp, Coffea canephora
cgccacttcaaggcataaaaataaacaaagcagcagtctttgttttccctcttttcatcagttcacaatttctttcttttccttaactccgcggcgtagatccgaggagtttcggaaacaaaatcacagctttagcaaaaccctatttcggccttctttcgcaaacctttccttttctcttcagatcttcatctcatcgctactatttgcgagtcatggctggccttgcaccggagggatctcaatttgatgcgcgtcaatatgatgctaaaatgaccgagttgcttggtactgatggtggtcaggagttcttcacttcttatgatgaggtttatgacagttttgattcaatggggttgcaagagaaccttctcaggggcatttatgcttatggttttgagaagccctctgctattcaacaaaggggaattgttcctttttgcaagggactggatgttattcagcaggcacagtctggaaccggaaagactgcaactttctgttcaggaatcctccagcagctagactacagtgtggttgagtgtcaggctcttgttcttgcccccacccgtgagctcgcgcagcaaattgagaaggttatgcgtgctcttggtgactaccttggtgtgaaggttcacgcttgcgtgggaggtactagtgtccgtgaggatcagcgcattctttccagtggggttcatgttgtagttggtactcctggtcgtgtatttgacatgttgaggagacagtcacttcgccctgattacatcaagatgtttgtgctggatgaagctgatgaaatgctttccagaggtttcaaggatcagatttatgatattttccagctcttgccgcccaagattcaggttggtgtattctcagctacaatgccacctgaggcacttgaaatcacaaggaagttcatgaacaaaccggtaaggattcttgtgaagcgtgatgagcttactcttgaaggtatcaagcaattctatgtcaatgttgaaaaggaggaatggaagcttgaaacactttgcgatctttatgagacccttgccattacccagagcgtcatctttgttaacaccaggcgtaaggtggactggctcactgataaaatgcgtagccgcgaccacacagtctcagccacccacggggacatggaccagaacaccagagacatcatcatgcgggaattccgctctggttcttctcgtgtgcttatcacaactgatcttctggcccgtggtattgatgtccaacaagtctcacttgttatcaactatgatctcccaactcagccagaaaattacctccatcgtattggtcgtagtggacgatttggaaggaagggtgttgctatcaactttgttactcgtgatgacgagcgcatgctctttgacatacagaagttttataatgttgtaattgaggagctgccagccaatgttgctgatctcctttgaagaggttttggcaagggcaaggtaaatttttccttgtttggagtaattttatatcttatttcgtaggtttagctaaaaaagtgtaccagacttgaaattgggaggtgcgggtgcaatgatttaccaagggcacttgcatgtctcagtttggtttaaaatcagaacctgttcttggaaattttgttggttgtctttgtattgtaagtgctcaaaataactgctgatttggagttgtttgaatattattgagttctacagtt

SEQ ID NO: 329 - protein, 414 aa, Coffea canephora
MAGLAPEGSQFDARQYDAKMTELLGTDGGQEFFTSYDEVYDSFDSMGLQENLLRGIYAYGFEKPSAIQQRGIVPFCKGLDVIQQAQSGTGKTATFCSGILQQLDYSVVECQALVLAPTRELAQQIEKVMRALGDYLGVKVHACVGGTSVREDQRILSSGVHVVVGTPGRVFDMLRRQSLRPDYIKMFVLDEADEMLSRGFKDQIYDIFQLLPPKIQVGVFSATMPPEALEITRKFMNKPVRILVKRDELTLEGIKQFYVNVEKEEWKLETLCDLYETLAITQSVIFVNTRRKVDWLTDKMRSRDHTVSATHGDMDQNTRDIIMREFRSGSSRVLITTDLLARGIDVQQVSLVINYDLPTQPENYLHRIGRSGRFGRKGVAINFVTRDDERMLFDIQKFYNVVIEELPANVADLL

SEQ ID NO: 330 - DNA, 1706 bp, Chlamydomonas reinhardtii
cctgcttaagcggcctcttcagctttcaaaacagctccttaaccgttttctttttcgcgggcctgaggccctgttcgaagcacaaccagcaaacatggctgccgcgccggttgagcgcaccggtttcgatgaccgcgccttcgacacgaagatgcagcagttcctgggcaacaacgaggacaagttctacaccgactgggaggagagctttgagagcttcgaccagatgaacctgcacgagaacctgctgcgcggcatttacgcgtacggtttcgagaagccctcggccattcagtcgaagggtatcgtgccgttcaccaagggcctggacgtgattcagcaggcccagtcgggcacgggcaagaccgccaccttctgcgccggcatcctgaacaacatcgattacaactcgaacgagtgccaggcgctggtgctggctcccacccgtgagctggcgcagcagattgagaaggtcatgcgcgccctgggcgacttcctgcaggttaagtgccacgcctgcgtgggtggcaccagcgtgcgtgaggacgcccgcatcctgggcgccggcgtgcaggtcgtggtcggtacccccggccgtgtcttcgacatgctgcgccgccgctacctgcgcgcggactccatcaagatgttcaccctggacgaggccgatgagatgctgtctcgcggtttcaaggaccagatctacgacatcttccagctgctgccccccaagctgcaggtcggtgtgttctccgccaccctgccccctgaggcgctggagattacccgcaagttcatgaacaagcccgtgcgcattctggtgaagcgcgatgagctgaccctggagggtatcaagcagttctacgtgaacgtggacaaggaggagtggaagctggacacgctgtgcgacctgtacgagacgctggccatcacccagtccgtcatcttcgccaacacccgccgcaaggtggactggctgacggacaagatgcgcgagcgcgaccacaccgtgtccgccacccacggcgacatggaccagaacacgcgcgatgtgatcatgcgcgagttccgctccggctcgtcgcgtgtgctgatcaccaccgacctgctggcccgcggcattgacgtgcagcaggtgtcgctggtcatcaactacgacctgcccacccagcccgagaactacctgcaccgcattggtcgctcgggccgcttcggacgcaagggtgttgccatcaacttcgtgaccaaggacgacgagcgcatgctccaggacatccagcggttctacaacaccgtgattgaggagctgccctcgaacgtcgctgacctcatctaagcgctctactaccaccaaatgtgcgctagcccctgggtccagccgatcccaagcacggggcgaagcctgcaggatgtgaagggcacggggcagggcgcgccgccacgcagccgccccgtgacccgacaacgtgctgtacgtgctgcgctgcgagtccttttgaacacgggccgtcgttgcgggtggtaaacgtgaacctgtgttgaggcgggtcggcgcagcttcggttgcagccatttgagagagaaggaagtttgccggtttgcaaacggcaggagttttgtcgcgaccgccatatgtttgacgccttttgagagtgccacaccgctgcccaacctattcgtatgactgtaaggacgcaagtctgcga

SEQ ID NO: 331 - protein, 413 aa, Chlamydomonas reinhardtii
MAAAPVERTGFDDRAFDTKMQQFLGNNEDKFYTDWEESFESFDQMNLHENLLRGIYAYGFEKPSAIQSKGIVPFTKGLDVIQQAQSGTGKTATFCAGILNNIDYNSNECQALVLAPTRELAQQIEKVMRALGDFLQVKCHACVGGTSVREDARILGAGVQVVVGTPGRVFDMLRRRYLRADSIKMFTLDEADEMLSRGFKDQIYDIFQLLPPKLQVGVFSATLPPEALEITRKFMNKPVRILVKRDELTLEGIKQFYVNVDKEEWKLDTLCDLYETLAITQSVIFANTRRKVDWLTDKMRERDHTVSATHGDMDQNTRDVIMREFRSGSSRVLITTDLLARGIDVQQVSLVINYDLPTQPENYLHRIGRSGRFGRKGVAINFVTKDDERMLQDIQRFYNTVIEELPSNVADLI

SEQ ID NO: 332 - DNA, 1561 bp, Ceratopteris richardii
ccacgcgtccgctctattccagcaggagccagctagacatggcgggttcggagggctacgatgcacgcgcttacgatgcgaagatggaacaagttctaacaggtgagggtgatgaaataagctcttcgtgggatgaagtttgtgaaacctttgatgagatgggacttcatgaaaatctgctcagaggcatctatgcttatggttttgagaagccatctccgatccagcagagaggtattgttccctttgccaagggtttggatgttatacaacaggctcaatctggtacaggaaaaacggcgacattttgctctggaatactgcaacagctcgactataatttgtttgattgtcaagcacttgttctcgctccaacacgtgagctggctcagcagatagaaaaagtaatgagggctcttggagattatctccaggtgaaggtacatgcttgtgttggtggaactagtgtaagagaggatattcgcatccttcagggtggagttcatgttgtggttggaactcctgggcgtgtatatgatatgcttcgacggggttctctccgtccagattacattaaaatttttgtccttgatgaagctgatgaaatgctttctcgtgggtttaaggatcagatatatgatatctttcagctactcccccagaatttacaggtaggtgtgttctctgcaacaatgcctcctgaggctctggagattacaaggaagtttatgaacaagcctgtgaggatccttgtcaagcgtgatgaacttactctcgaaggtatcaagcaattctatgtagatgtgcaaaaagaggaatggaaacttgatactctgtgtgatctgtatgagactcttgctattacacaaagtgtcatctttgttaataccagaaggaaagttgattggttgactgataaaatgagggctagagatcatacagtgtccgctacacatggagatatggatcagaacacacgtgatatcatcatgagagagttcaggtcaggatcatccagggtgctgatcactactgatcttttggcaaggggaatagatgtacagcaggtctccctggttatcaattatgacctgcctacacagccggaaaattacttacatagaattggtcgtggtggacggttcggaaggaagggtgtagccattaattttgtcacacgagaggatgagcggatgctacaggatattcagagattctacaatgttgtgatcgaggagctaccctccaatgttgcagatctaatatgagactttacttacgggatgattcctactgtacttaaaaatggaaagttcttgccagttgatctggttatcggttctgtcaaacacttttgagtttatatgagcataagttttcttatcatctcagttggattggtggaaagagctgatattcaacggaatctgtccaaattctgcattagtgggatcctcatgctaaatattacagttgtctttgtgttcttttgtccttcatagtattttagcgattcgatttttatgctttatcatttgatatagagtttttgcacgacttg

SEQ ID NO: 333 - protein, 409 aa, Ceratopteris richardii
MAGSEGYDARAYDAKMEQVLTGEGDEISSSWDEVCETFDEMGLHENLLRGIYAYGFEKPSPIQQRGIVPFAKGLDVIQQAQSGTGKTATFCSGILQQLDYNLFDCQALVLAPTRELAQQIEKVMRALGDYLQVKVHACVGGTSVREDIRILQGGVHVVVGTPGRVYDMLRRGSLRPDYIKIFVLDEADEMLSRGFKDQIYDIFQLLPQNLQVGVFSATMPPEALEITRKFMNKPVRILVKRDELTLEGIKQFYVDVQKEEWKLDTLCDLYETLAITQSVIFVNTRRKVDWLTDKMRARDHTVSATHGDMDQNTRDIIMREFRSGSSRVLITTDLLARGIDVQQVSLVINYDLPTQPENYLHRIGRGGRFGRKGVAINFVTREDERMLQDIQRFYNVVIEELPSNVADLI

SEQ ID NO: 334 - DNA, 1769 bp, Cycas rumphii
ggttgctattgagtttggtatcggtgcggtttctgtagtctgctgcgcaaatttgcctcagtgtttcttctttccgttaacaggttctttcaaatctacgacacatacaatcatggcgggattggcagcagagggaactcagtttgatgctcgtcagtatgacgccaagatgaatgaaatactttctaccgagggcgaggaactttttgccacttatgatgaggtccacgagaccttcgattcaatgggattacacgaaaatcttctcagaggcatctatgcctacggttttgagaagccctctgcgatccagcagagagggattgtgccgttctgcaagggtcttgacgtgatccagcaagcccaatctggaactggcaagacggcaactttctgttccggaattctgcagcagcttgattataacttgctggaatgtcaagctttggttcttgctcctacgcgagagcttgcccaacaaattgaaaaggtcatgcgggctcttggtgattacctgcaggttaaagtacatgcttgcgttgggggcacgagtgtccgtgaagaccagcgtatcctcatgagcggagttcacgttgttgttgggacacccggtcgtgtgtttgatatgttgcgcaggcactctcttcgtcctgattacatcaagatgtttgtgttggacgaggccgatgaaatgctttctaggggtttcaaggatcagatctatgatattttccagcttcttccttcaaagattcaagtaggtgttttttcagctacgatgcctcctgaggcccttgaaatcacaagaaaattcatgaataaacctgtgagaattttagtgaagagggacgagttgacactcgagggtataaaacagttttatgtcaatgttgataaggaggactggaagcttgatactctctgtgatttgtatgagactctggctattactcagagtgttatttttgttaataccagacgaaaggttgattggctgactgacaaaatgagggctcgtgatcacacagtctcagctactcatggagacatggatcagaacaccagggatattataatgagggaatttcgatctggttcctcacgtgtcctgattacaactgacctgcttgctcgaggtattgatgtgcagcaagtgtctcttgtcatcaattatgatcttcccactcagccagagaactacctccaccgtattggtcgaagtggcaggtttggaagaaagggtgtggccatcaattttgttacaagggatgatgagagaatgttgcaagatattcagagattctacaatgtggttattgaggagcttccctcaaatgttgctgatcttctttgaggttttgtgcttgctatctgtgagaaaggtctgaggaggataagtatcgctttattatcagacaattctttaagtttattttgcctcaaaacaagtgaggtgcttccgagctttgttacttaggtatatttggggcctgtaagttgcagatttctgagtatgaagtatgcgttgggtggtaaaaatcttttattcacccagctagagacttgttttctaaccacccccctcaactcccttagtttttgcttattggcatttggcataaaaagtttaagtgggacagacgacaggaattttcttgttgcctgtgtcagtttagtgtattgcatcatggaaacacttaaatatgggatgcagtccttgcaaattttgtacgagttagattatgtatgctaaattttattgcatgtaa

SEQ ID NO: 335 - protein, 413 aa, Cycas rumphii
MAGLAAEGTQFDARQYDAKMNEILSTEGEELFATYDEVHETFDSMGLHENLLRGIYAYGFEKPSAIQQRGIVPFCKGLDVIQQAQSGTGKTATFCSGILQQLDYNLLECQALVLAPTRELAQQIEKVMRALGDYLQVKVHACVGGTSVREDQRILMSGVHVVVGTPGRVFDMLRRHSLRPDYIKMFVLDEADEMLSRGFKDQIYDIFQLLPSKIQVGVFSATMPPEALEITRKFMNKPVRILVKRDELTLEGIKQFYVNVDKEDWKLDTLCDLYETLAITQSVIFVNTRRKVDWLTDKMRARDHTVSATHGDMDQNTRDIIMREFRSGSSRVLITTDLLARGIDVQQVSLVINYDLPTQPENYLHRIGRSGRFGRKGVAINFVTRDDERMLQDIQRFYNVVIEELPSNVADLL

SEQ ID NO: 336 - DNA, 1759 bp, Citrus sinensis
cacaagtgttggaggccccgtataatatataagtgctgcaaagaccaaactttagtcccttcccttttaactccacggcgcagatccgaggagtttggtaaccctagcaactattttctcttaaatcaatcttctccttctctttgaaaaaaaaaagaaaaccaactctttctctccattttaatcaccatcatcaaagctttgcagatatggctggtttggcacccgaaggatctcaatttgatgctcgtcagtatgacaccaagatgaatgaactgctctctactgatgggcaagatttcttcacttcttatgatgaagtttatgacagttttgatgcaatgggactgcaggaaaaccttttgaggggaatctatgcctatgggtttgagaagccctctgctattcagcaaaggggaattgttcccttctgcaagggacttgacgtcattcagcaggctcagtctggaactgggaaaacagcaactttctgctctggaattttgcagcaacttgattatggtcttgtccaatgtcaggccctggtgttggcacccactagggaactagctcaacaaattgagaaagtaatgagggcacttggtgattatcttggtgttaaggttcatgcttgtgtcggtgggacaagtgttcgcgaggatcagcgcattcttcaagctggtgttcatgttgttgttggcactcctggtcgtgtgtttgacatgctgcgccgacagtctttacgccctgattacattaagatgtttgtactggatgaggctgatgaaatgctttcccgtggttttaaggatcagatctatgatattttccagctgcttccagctaaagttcaggtgggggttttctctgctacaatgcctcctgaggccttggagattacaaggaagtttatgaacaagcctgtgagaatcttggttaaacgtgatgaactcacccttgagggtatcaagcaattttatgtcaatgttgagaaggaagaatggaagcttgaaacactctgtgatctttatgagactctggccataacccagagtgtcatctttgtgaacactcggcgaaaggtcgactggcttacggacaagatgcgaagccgtgaccatacagtctctgccactcatggggacatggatcagaacacccgagatatcattatgcgtgaatttcgctctggttcttctcgtgttctcatcaccactgatctgttggctcgtggtattgatgtgcagcaagtttcacttgtcataaattatgatctgccgactcaaccagaaaactaccttcaccgtattggacgaagtggtcgatttggaagaaagggtgttgccattaattttgtgacaagggatgatgagagaatgctttttgatattcaaaagttctataacgtggtcattgaggagctgccttcaaacgttgctgaccttctttgaggaggttctgtttttgtaagtttgtcgaggcaagaaggggtttcctgattttgcaagtactgtttaatgtggtggttcttttctcccctttttttttttttttggtttcttcttcctttccgtctagtgtcttaaattaatgttgttctcaaacatatccgaccatttaatcatatgggtcatgcacatttgcaagctgcactgtggtgggtttataattattgaaatttttgttgctgggaggtctttgtattttatgtccttttgttatcaattttatttctattataattgttagcagaaaaaaa

SEQ ID NO: 337 - protein, 413 aa, Citrus sinensis
MAGLAPEGSQFDARQYDTKMNELLSTDGQDFFTSYDEVYDSFDAMGLQENLLRGIYAYGFEKPSAIQQRGIVPFCKGLDVIQQAQSGTGKTATFCSGILQQLDYGLVQCQALVLAPTRELAQQIEKVMRALGDYLGVKVHACVGGTSVREDQRILQAGVHVVVGTPGRVFDMLRRQSLRPDYIKMFVLDEADEMLSRGFKDQIYDIFQLLPAKVQVGVFSATMPPEALEITRKFMNKPVRILVKRDELTLEGIKQFYVNVEKEEWKLETLCDLYETLAITQSVIFVNTRRKVDWLTDKMRSRDHTVSATHGDMDQNTRDIIMREFRSGSSRVLITTDLLARGIDVQQVSLVINYDLPTQPENYLHRIGRSGRFGRKGVAINFVTRDDERMLFDIQKFYNVVIEELPSNVADLL

SEQ ID NO: 338 - DNA, 1776 bp, Citrus sinensis
ggggtctttactcggcagcaacatctctctccctctctctctctctctctctctatctttatatccatcgatactgcctgctactacccgcgtgtttccttgaactcctctccctcaaagcaaacaactaaactcagagatccgaggagttcggggaaaaccctaacccaaaccctagtctttaaaatcaaacaagcttccacctttcatcatcatcactatcagtcatggctggtttggctgaaggatcccagtttgatgcccgtcaatttgatgctagaatgaatgatttacttggaagtgatggacaagatttcttcacatcgtatgatgaggtttatgatacttttgatgctatgggattgcaagagaatcttcttagaggcatttatgcatatggttttgagaagccttctgccattcagcaaagggggattgttccattctgcaagggacttgatgtaattcaacaagcacagtctggaactggaaaaactgcaactttttgctccggaattttgcagcagcttgattatggtttagttgaatgccaagcattggttcttgctccaactagggaactggcgcaacagattgagaaggttatgcgagcacttggtgactatcttggtgtcaaagtgcatgcatgtgtaggtggaaccagtgtccgtgaagatcaacgcattctttcaagcggtgtacatgttgtagttggtacacctggtcgtgtgtttgacatgttgcggaggcaatctcttcgcccagataacatcaggatctttgtgctggatgaggctgatgaaatgctgtcacgaggtttcaaagaccagatctatgatatcttccagttgctacccccaaagattcaagttggggttttctctgccacaatgccaccagaggcccttgaaatcacaaggaagttcatgaataaaccggttaggattctggtgaaacgtgatgagcttaccctagaaggtatcaagcaatttcatgttaatgttgaaaaggaggaatggaagcttgagacactatgcgatctgtacgagactttggcaatcacccaaagtgtcatctttgtgaacacccggcgtaaggtagattggctgacagataagatgcgtagtcgtgatcataccgtgtctgccacccacggtgacatggaccaaaacactagggacatcatcatgcgtgaattccggtctggttcgtctcgtgtgcttatcactactgatctcttggcacgtggtattgatgtccagcaagtgtccctggtcataaattatgatcttcctacacagccagaaaactacctgcatcgtataggtcgtagtggacgatttggaagaaagggtgttgccattaatttcgtgaccagggatgatgaaaggatgctgtttgatattcaaaagttttacaatgtcgtaattgaagagctgccagcaaatgttgctgatctcctgtgatgtgtttttggattggtaaggtgtttttgaagtttgaagtctagtcattatggtgggtctggagtggttgctaaaagaaccctacaattatggcatttggaatggcctttgtttaagtttatgttgcatctgttgtaggtttgcattaaattatgttgttctacactttttttttaattgttgtgcgacattatgtagagttggagcatggctagtttatttgtcttaggaaaactcgacttgcttgcttattgctttttaaagttatttggcttgttctttcatctaatataaacaaggctgcaaaaaa

SEQ ID NO: 339 - protein, 412 aa, Citrus sinensis
MAGLAEGSQFDARQFDARMNDLLGSDGQDFFTSYDEVYDTFDAMGLQENLLRGIYAYGFEKPSAIQQRGIVPFCKGLDVIQQAQSGTGKTATFCSGILQQLDYGLVECQALVLAPTRELAQQIEKVMRALGDYLGVKVHACVGGTSVREDQRILSSGVHVVVGTPGRVFDMLRRQSLRPDNIRIFVLDEADEMLSRGFKDQIYDIFQLLPPKIQVGVFSATMPPEALEITRKFMNKPVRILVKRDELTLEGIKQFHVNVEKEEWKLETLCDLYETLAITQSVIFVNTRRKVDWLTDKMRSRDHTVSATHGDMDQNTRDIIMREFRSGSSRVLITTDLLARGIDVQQVSLVINYDLPTQPENYLHRIGRSGRFGRKGVAINFVTRDDERMLFDIQKFYNVVIEELPANVADLL

SEQ ID NO: 340 - DNA, 1613 bp, Citrus x paradisi x Poncirus trifoliata
gcagatccgaggagtttggtaaccctagcaactattctctcttaaatcaatcttctccttctctttgaaaaaaaaaagaaaaccaactctttctctcgattttaatcaccatcatcaaagctttgcagatatggctggtttggcacctgaaggatctcaatttgatgctcgtcagtatgacaccaagatgaatgaactgctctctactgatgggcaagatttcttcacttcttatgatgaagtttatgacagttttgattcaatgggactgcaggaaaaccttttgaggggaatctatgcttatgggtttgagaagccttctgctattcagcaaaggggaattgttcccttctgcaagggacttgacgtcattcagcaggctcagtctggaactgggaaaacagcaactttctgctctggaattttgcagcaacttgattatggtcttgtccaatgtcaggccctggtgttggcacccactagggaactagctcaacagattgagaaagtaatgagggcacttggtgattatcttggtgttaaggttcatgcttgtgtcggtgggacaagtgttcgcgaggatcagcgcattcttcaagctggtgttcatgttgttgttggcactcctggtcgtgtgtttgacatgctgcgccgacagtctttgcgccctgattacattaagatgtttgtactggatgaggctgatgaaatgctttcccgtggttttaaggatcagatctatgatattttccagctgcttccagctaaagttcaggtgggggttttctctgctacaatgcctcctgaggccttggagattacaaggaagtttatgaacaagcctgtgagaatcttggttaaacgtgatgaactcacccttgagggtatcaagcagttttatgtcaatgttgagaaggaagaatggaagcttgaaacactctgtgatctttatgagactctggccataacccagagtgtcatctttgtgaacactcggcgaaaggtcgactggcttactgacaagatgcgaagccgtgaccatacagtctctgccactcatggagacatggatcagaacacccgagatatcattatgcgtgaatttcgctctggttcctctcgtgttctcatcaccactgatctgttggctcgtggtattgatgtgcaacaagtttcacttgtcataaattatgatctgccgactcaaccagaaaactaccttcaccgtattggacgaagtggtcgatttggaagaaagggtgttgccattaattttgtgacaagggatgatgagagaatgctttttgatattcaaaagttctataacgtggtcattgaggagctgccttcaaacgttgctgaccttctttgaggaggttctgttttttgtaagtttgtcgaggcaagaaggggtttcctgattttgcaagtactatttaatgtgggggttcttttctcccccttttttttttttggtttcttcttcctttccgtctagtgtcttaaattaatgttgttctcaaacatatccgaccatttaatcatatgggtcatgcacatttgcaagctgcactgtggtgggtttataattattgaaatttttgttgctggtt

SEQ ID NO: 341 - protein, 413 aa, Citrus x paradisi x Poncirus trifoliata
MAGLAPEGSQFDARQYDTKMNELLSTDGQDFFTSYDEVYDSFDSMGLQENLLRGIYAYGFEKPSAIQQRGIVPFCKGLDVIQQAQSGTGKTATFCSGILQQLDYGLVQCQALVLAPTRELAQQIEKVMRALGDYLGVKVHACVGGTSVREDQRILQAGVHVVVGTPGRVFDMLRRQSLRPDYIKMFVLDEADEMLSRGFKDQIYDIFQLLPAKVQVGVFSATMPPEALEITRKFMNKPVRILVKRDELTLEGIKQFYVNVEKEEWKLETLCDLYETLAITQSVIFVNTRRKVDWLTDKMRSRDHTVSATHGDMDQNTRDIIMREFRSGSSRVLITTDLLARGIDVQQVSLVINYDLPTQPENYLHRIGRSGRFGRKGVAINFVTRDDERMLFDIQKFYNVVIEELPSNVADLL

SEQ ID NO: 342 - DNA, 1514 bp, Emiliania huxleyi
ggcatcgaggctggacatgactgaggagacaaagaccattgtgacggaagacggcaccgtcgaaactaactacgatgaggtcatcgagagcttcgatgacatgggcctcaaggaggacctcctccgcggcatctacgcctacggctttgagaagccgtcggcgatccagcagcgcgccatcaagccgctcatcatgatgcgcgacacaatcgcgcaggcgcagtcgggcacgggcaagacggccaccttcaccatcggcctgctccagaacatcgacatcgccaaccgcgactgccaggcgctgatcctcgcgccgacgcgcgagctcgccacgcagatcgtcaaggtcgttatggccatcggcgattacctcggcatcaccaccatggcgtgcatcggcggcaccaacgtgcgcgaggacatgagcaagctgcagaacggcgtgcagctggtggtcggcacgccgggccgtgtgttcgacatgatcaaccggcgcgcgctccgcgtcgactacatccagtacttcgtcctcgacgaggcggacgagatgctctcgcgcggcttcaaggatcagatctacgacgtcttccagaagctgccgccgacggtgcacgtcggcctcttctcggccaccatgccgacggacgtgctcgagctgaccaccaagttcatgcgcgacccgatccgcattctggtgaagcgcgacgagctgacgctcgacggcatcaagcagttctacgtcatggtcgagcgggaggagtggaagctcgacacgctctgcgacctttacgagacgctgaccatcacgcaggcgatgatctttgtcaacacgcgccgcaaggtcgagtggctgacggagaagatgcacgcgcgcgacttcacgtgctcggccatccacgccgacttggaccagaaggagcgcgaggtcatcatgcgggagttccgctcgggcagcagccgcgtgctcatcaccaccgatgtgctcgcacgaggcatcgatgtgcagcaggtctcgctcgtcatcaactacgatttgccgacgaaccgcgagaactacatccaccgcatcggtaggggcggccggtttggtcgcaagggtgtcgccatcaacttcctcacaaacgacgacgtgcgcacgctgagggagatcgagcagttttacaacacgcagattgacgagatgccaatgaacgtggccgaccttatctaatgtgggggccggcggcggcctaggaccgcccacccccaagcacgctggccgcttctctctccgcgcatcgcaagacccagtgtggccgtttgccgcgcgcagagccgctcctgcgcgaagcgcgggtggctcgtacagcaaacagcgcacttctcgcggtcgctccgcgcacacctacagccgcgctgtgcatgccacccgcacccccccttgtgtctgttttgtcctgtgacgctgcggtcgtgtagcggggtcttcgaaggagctttccgcgagatcaccatgctctaacctctctatgccg

SEQ ID NO: 343 - protein, 397 aa, Emiliania huxleyi
MTEETKTIVTEDGTVETNYDEVIESFDDMGLKEDLLRGIYAYGFEKPSAIQQRAIKPLIMMRDTIAQAQSGTGKTATFTIGLLQNIDIANRDCQALILAPTRELATQIVKVVMAIGDYLGITTMACIGGTNVREDMSKLQNGVQLVVGTPGRVFDMINRRALRVDYIQYFVLDEADEMLSRGFKDQIYDVFQKLPPTVHVGLFSATMPTDVLELTTKFMRDPIRILVKRDELTLDGIKQFYVMVEREEWKLDTLCDLYETLTITQAMIFVNTRRKVEWLTEKMHARDFTCSAIHADLDQKEREVIMREFRSGSSRVLITTDVLARGIDVQQVSLVINYDLPTNRENYIHRIGRGGRFGRKGVAINFLTNDDVRTLREIEQFYNTQIDEMPMNVADLI

SEQ ID NO: 344 - DNA, 1512 bp, Fragaria vesca
ttcaaactccacggcgcagatcggaggagtttgccaaaccctagctctctctctacctattcttcagctctcctttctctcaagcttttcatcagctcaatcagatatggcaggtctggctcccgaaggtgctcaatttgatgctaaacagtatgattctaagatgaatgagatcctctcatctgaaggccaagagttctttacatcgtatgatgaggttcacgacagttttgatgccatgggtttacaagaaaatcttctgcgtggaatctatgcttacggttttgagaagccttctgcaattcagcaaaggggaattgttcctttttgtaaaggtttggatgtgattcaacaagctcagtcaggaacaggcaaaacagcaaccttctgctcgggaattttgcagcaacttgactatggtttggtccagtgccaggctttggtgttggcacctaccagggagttggcacagcagattgagaaggttatgcgggcactgggtgactatcttggtgttaaggttcatgcttgcgtaggtgggactagtgttcgtgaggatcagcgaattcttcaagctggtgtgcatgtggtggttggcactcctggacgtgtgttcgacatgttgaggaggcaatcacttcgtgcagattacattaagatgtttgttttggatgaagctgatgaaatgctatctaggggtttcaaggatcagatctatgacatttttcagcttctgccatcaaaagttcaagttggtgttttctctgctactatgcctcctgaagcccttgagatcaccagaaagtttatgaacaaacctgttaggattttggttaagcgtgatgagctcacccttgagggaatcaagcagttttatgttaatgttgacaaggaagaatggaagcttgagacactttgtgatctctacgagacccttgctatcactcagagtgtcatttttgttaatacaaggcgcaaagtggattggcttacagataagatgcgaagccgtgaccacacagtctctgctacccatggtgacatggaccagaaccagcgtgacataatcatgcgtgagtttcgttctggttcctcccgtgttctcatcacaactgatctgttggcacgtggtattgatgtgcagcaagtgtcacttgtaattaattatgatttgccaactcaaccagaaaactacctccatcgtattggtcgaagtggtcgatttggaagaaaaggtgttgccatcaattttgtaacaagggatgatgaaagaatgctatttgacattcagaggttttataatgtggtgattgaggagctgccttccaatgtggctgatcttctgtgaggagctgattttgctctttttgttattgaggcagatttctggttcctgttttgaaagtactatttatttttgtttttctgtcttttgtttttaattgatgctgtaaaaccttttaagaatgcctgttgcatacttgctaagcgatgtccaattggtttttcatg

SEQ ID NO: 345 - protein, 413 aa, Fragaria vesca
MAGLAPEGAQFDAKQYDSKMNEILSSEGQEFFTSYDEVHDSFDAMGLQENLLRGIYAYGFEKPSAIQQRGIVPFCKGLDVIQQAQSGTGKTATFCSGILQQLDYGLVQCQALVLAPTRELAQQIEKVMRALGDYLGVKVHACVGGTSVREDQRILQAGVHVVVGTPGRVFDMLRRQSLRADYIKMFVLDEADEMLSRGFKDQIYDIFQLLPSKVQVGVFSATMPPEALEITRKFMNKPVRILVKRDELTLEGIKQFYVNVDKEEWKLETLCDLYETLAITQSVIFVNTRRKVDWLTDKMRSRDHTVSATHGDMDQNQRDIIMREFRSGSSRVLITTDLLARGIDVQQVSLVINYDLPTQPENYLHRIGRSGRFGRKGVAINFVTRDDERMLFDIQRFYNVVIEELPSNVADLL

SEQ ID NO: 346 - DNA, 1608 bp, Fragaria vesca
agtcttattgctgctgctgcgttccctcaactcctcacaaccaaatcacagagatccgaggagttcaggaaaaccctaactctcaactcagtcgccgactctcttacttctccgacctctcaactctctcgctttcagtcatggctggcgctgcaccggaagggtctcagtttgatactcgtcaatacgatgccaaaatgaccgagctacttggatctgatggacaagatttcttcacctcgtatgacgaggttcatgacagttttgatgtcatgggactgcaggaaaaccttcttaggggaatctatgcatatggttttgagaagccctctgcaattcagcaaaggggaattgttcccttctgcaagggacttgatgttatccaacaggcacaatctggaactggaaaaacagccactttctgctctggaattttgcagcagcttgattatgccatgctcgactgccaggcattagttcttgcacctacccgagaacttgctcaacagattgagaaggttatgcgggctctcggtgactacctcggtgtcaaggttcatgcttgtgttggtgggactagtgtccgtgaagatcaacgtgttctctctagcggagtccatgttgttgttggtacacctggccgagtctttgacatgttgcggaggcagtctctccgtccagattgcattaggatgtttgtgttagatgaagctgatgaaatgctctcaagaggtttcaaggatcagatctatgacattttccagctgctcccacccaaaattcaggtgggtgttttttctgccacaatgccaccagaagcccttgatatcaccaggaagttcatgaacaagcctgtgagaattttggtgaaacgtgatgagctcactcttgagggtattaagcagttccatgtcaatgttgacaaggaagagtggaagcttgaaacgctttgcgatctttatgagaccttggcaatcacccagagtgtcatctttgtgaacaccaggcgcaaagttgattggctgacagacaagatgcgcagccgtgatcacacggtctctgccacccatggtgacatggagcaaaacactagggacatcatcatgagagagtttaggtctggttcttctcgtgtgctcatcacaactgatctgttggcccgtggtattgatgtccagcaggtgtctcttgtgattaactatgaccttcctacacagccggaaaactacctgcatcgtattggtcgtagtggtaggtttgggaggaagggtgttgccatcaactttgtgaccaaggatgatgaaaggatgttgtttgacatccagaagttctacaatgtcgtaattgaggagctgcctgctaatgttgctgatcttctgtaagcaaggttttggtttggtgtggtaattggctttgtaattcagaaagccatatttattttcctccttgtaggtgtaagggctgttatttagcatggattacttgaaactggggtagtggtcctgtccgtttgtgactggattccatccccatttcagtgtggataaaccacttaaaaattttgtttagtattcgagacaagtttgcagtattaacttattttggatt

SEQ ID NO: 347 - protein, 413 aa, Fragaria vesca
MAGAAPEGSQFDTRQYDAKMTELLGSDGQDFFTSYDEVHDSFDVMGLQENLLRGIYAYGFEKPSAIQQRGIVPFCKGLDVIQQAQSGTGKTATFCSGILQQLDYAMLDCQALVLAPTRELAQQIEKVMRALGDYLGVKVHACVGGTSVREDQRVLSSGVHVVVGTPGRVFDMLRRQSLRPDCIRMFVLDEADEMLSRGFKDQIYDIFQLLPPKIQVGVFSATMPPEALDITRKFMNKPVRILVKRDELTLEGIKQFHVNVDKEEWKLETLCDLYETLAITQSVIFVNTRRKVDWLTDKMRSRDHTVSATHGDMEQNTRDIIMREFRSGSSRVLITTDLLARGIDVQQVSLVINYDLPTQPENYLHRIGRSGRFGRKGVAINFVTKDDERMLFDIQKFYNVVIEELPANVADLL

SEQ ID NO: 348 - DNA, 1727 bp, Gossypium hirsutum
caacacttctctcctctctcaaaactccgcggcgcagatccgaggagtttgggaaaccctatctctctctaaatatcaaccgaaaaaagctctcaaaaaactaccctttcttccccccccctctctctctctcactttctctcattctctttctttccagcctttctacactctttttttccccatcgctcctactgttttcatctgcttcaagtcatggcaggtttggcaccggaaggatcccaatttgatgctcgccaatatgatcagaaaatgactgagttgctccaaactgatggagatgattttttcacgagttatgatgaagtttatgacagttttgatgcaatgggacttcaagagaatcttctgaggggtatctatgcgtatggttttgagaagccttctgcaattcaacaacgaggtattgttccattttgcaagggtcttgatgttattcagcaagcacagtccggaactgggaagacagcaactttctgctctggaattctacaacaacttgattatgctatggtccaatgccaggctctggttttggcacccaccagggagttggcacaacagattgagaaagtgatgcgggcacttggtgattaccttggtgttaaggtccacgcttgtgttggtgggacaagtgttcgtgaggaccagcgcattcttcaaagtggtgttcatgttgttgttggaactcctggtcgtgtctttgacatgttgaggaggcagtcactccgcccagattatattaagatgtttgttttggatgaggctgatgaaatgctttctcgtggttttaaggatcagatctacgatatcttccagctgctgccagccaagattcaggtgggagtattttctgccacaatgccacctgaagcccttgagatcactaggaagttcatgaacaaaccagtgagaattttggttaagcgtgatgagctcgccctcgagggtatcaagcagttttatgtgaatgttgaaaaggaggaatggaagcttgaaactctttgtgatctctatgagacccttgccatcacccagagtgtcattttcgtgaacacaagacgcaaggttgactggctaactgacaagatgcgaagccgtgaccacacagtttctgccacccatggagacatggaccagaacactcgtgacatcatcatgcgtgaattccgctccggttcttctcgtgttctcatcacaactgatctccttgctcgtggtattgatgtgcagcaagtgtctctagtcataaactatgatctgccgactcaaccagaaaactacctccaccgtatcggacgaagtggaaggtttggaaggaaaggtgttgccattaactttgtgactaatgatgacgagagaatgctgtatgacatccagaagttctacaatgtgatcattgaggagctgccgtcaaacgtcgctgatctcctttgatgagattaccttttttggaagattatttgaggcaaagggttttgttgttttgcaagtcctattttaacgtgcgcttttcttgtttctttctttatttttttttcttcctttctagtttcttaagttaatgttgttcttaaaaacatatttgaccattttaatgatatggttcctgcacattttctagataatgattgtccagttttgcccactcctttgctgtgggtttatcgttatttgatattctaatgcagctaggggtttttgga

SEQ ID NO: 349 - protein, 413 aa, Gossypium hirsutum
MAGLAPEGSQFDARQYDQKMTELLQTDGDDFFTSYDEVYDSFDAMGLQENLLRGIYAYGFEKPSAIQQRGIVPFCKGLDVIQQAQSGTGKTATFCSGILQQLDYAMVQCQALVLAPTRELAQQIEKVMRALGDYLGVKVHACVGGTSVREDQRILQSGVHVVVGTPGRVFDMLRRQSLRPDYIKMFVLDEADEMLSRGFKDQIYDIFQLLPAKIQVGVFSATMPPEALEITRKFMNKPVRILVKRDELALEGIKQFYVNVEKEEWKLETLCDLYETLAITQSVIFVNTRRKVDWLTDKMRSRDHTVSATHGDMDQNTRDIIMREFRSGSSRVLITTDLLARGIDVQQVSLVINYDLPTQPENYLHRIGRSGRFGRKGVAINFVTNDDERMLYDIQKFYNVIIEELPSNVADLL

SEQ ID NO: 350 - DNA, 1242 bp, Glycine max
atggcaggaattgcacccgagggatcacagtttgatgctcgtcaatatgataccaagatgaatgagctgcttacgtccgatggtcaggatttcttcacatcctacgatgaggtttatgacagttttgatgctatgggcttgcaagagaatctcctgagaggcatttatgcatatggttttgagaagccatcagctattcagcaaaggggaatagttccattctgcaagggacttgacgttatacaacaggcccagtctggaactgggaaaacagcaactttctgctctggaattctgcagcaacttgactatagtgtgactgaatgccaagccttggttttagcaccaactagggagcttgctcagcaaattgaaaaggttatgcgggcactcggagattatcttggtgtgaaggtgcacgcatgtgtgggaggtaccagtgttcgtgaagaccaacgcattctatcaagtggtgttcatgttgttgttggtactcctggtcgtgtatttgatatgctgcgcagacagtcacttcggccagactatatcaagatgtttgtattggatgaggctgatgaaatgctttcccgtggttttaaagatcagatctatgatatattccagttgcttccatctaagattcaagtgggagttttctctgctacaatgcctcccgaggcacttgagatcacaaggaagttcatgaacaaacctgtgaggatccttgtgaagcgtgatgagctcaccttggagggtatcaagcaatttcatgtcaatgttgagaaagaggaatggaagcttgacacactgtgtgatctttatgagacattggcaattactcagagtgtcatttttgtgaacaccagaagaaaggttgattggctgactgacaagatgcgaagtcgagaccacacagtctcagcaacccatggagacatggaccagaataccagggacattattatgcgtgaattccgttctgggtcatcccgtgttttgataactactgatcttttggcccgtggtattgatgtccagcaagtgtctttagttataaattatgatctcccaacgcagcctgagaactatctccatcgtattggacgtagtggaaggtttggtaggaaaggtgttgccattaacttcgtcacaaaggatgatgaaaaaatgctgtttgacatccagaagttttacaatgtggtaattgaggagctgccttcaaatgttgctgaactcctttga

SEQ ID NO: 351 - protein, 413 aa, Glycine max
MAGIAPEGSQFDARQYDTKMNELLTSDGQDFFTSYDEVYDSFDAMGLQENLLRGIYAYGFEKPSAIQQRGIVPFCKGLDVIQQAQSGTGKTATFCSGILQQLDYSVTECQALVLAPTRELAQQIEKVMRALGDYLGVKVHACVGGTSVREDQRILSSGVHVVVGTPGRVFDMLRRQSLRPDYIKMFVLDEADEMLSRGFKDQIYDIFQLLPSKIQVGVFSATMPPEALEITRKFMNKPVRILVKRDELTLEGIKQFHVNVEKEEWKLDTLCDLYETLAITQSVIFVNTRRKVDWLTDKMRSRDHTVSATHGDMDQNTRDIIMREFRSGSSRVLITTDLLARGIDVQQVSLVINYDLPTQPENYLHRIGRSGRFGRKGVAINFVTKDDEKMLFDIQKFYNVVIEELPSNVAELL

SEQ ID NO: 352 - DNA, 1242 bp, Glycine max
atggctggactagcacctgaggggtcacagttcgatgctcgtcaatatgattccaaaatgagtgacttactttcatctgatggacaggacttcttcacatcctatgacgaggtttatgatagttttgacgctatgggtttgcaggagaatcttctcaggggaatttacgcatacggttttgagaagccatcagccattcagcaaagggggatagttcccttctgcaagggacttgatgttattcaacaggctcaatctggaactgggaagacggctactttctgctctggtattctgcagcaacttgactatagcttgactcaatgccaggccttggttttggcaccaactcgtgagcttgctcagcagattgagaaagttatgcgggcacttggagattatcaaggtgtgaaggttcatgcttgtgtgggaggtaccagtgtgcgtgaggaccagcgcattctatctagtggtgttcatgttgtggttggtacccctggtcgtgtgtttgatatgctgcgccgacagtcacttcagccagaccacatcaagatgtttgtattggatgaggctgatgaaatgctttcccgaggtttcaaggatcagatctacgatatatttcagctgcttccatctaagattcaagtgggagttttctctgccacaatgcctcctgaggcccttgagatcaccaggaagtttatgaacaaacctgtgaggatccttgtgaagcgtgatgagctcaccttggagggtattaagcaattttatgtcaatgttgaaaaggaggaatggaagctggacacactctgcgatctttatgagacattagctatcactcagagtgtcatttttgttaacaccagaaggaaagttgattggttgactgacaagatgagaagccgtgaccacacagtctcagcaacccacggagacatggaccagaataccagggacattattatgcgtgaattccgttctgggtcttcccgtgtcttgataaccactgatcttttggctcgtggtattgatgtccaacaagtgtctctagttataaattttgatctcccaacacagcctgagaactatctccatcgtattggtcgtagtgggaggttcggaaggaagggtgttgcgatcaactttgtcacaaaggatgacgagaaaatgctgtttgacatccagaagttttacaacgtgcaagttgaggagctgccttcaaatgttgctgagctcctttga

SEQ ID NO: 353 - protein, 413 aa, Glycine max
MAGLAPEGSQFDARQYDSKMSDLLSSDGQDFFTSYDEVYDSFDAMGLQENLLRGIYAYGFEKPSAIQQRGIVPFCKGLDVIQQAQSGTGKTATFCSGILQQLDYSLTQCQALVLAPTRELAQQIEKVMRALGDYQGVKVHACVGGTSVREDQRILSSGVHVVVGTPGRVFDMLRRQSLQPDHIKMFVLDEADEMLSRGFKDQIYDIFQLLPSKIQVGVFSATMPPEALEITRKFMNKPVRILVKRDELTLEGIKQFYVNVEKEEWKLDTLCDLYETLAITQSVIFVNTRRKVDWLTDKMRSRDHTVSATHGDMDQNTRDIIMREFRSGSSRVLITTDLLARGIDVQQVSLVINFDLPTQPENYLHRIGRSGRFGRKGVAINFVTKDDEKMLFDIQKFYNVQVEELPSNVAELL

SEQ ID NO: 354 - DNA, 1242 bp, Glycine max
atggctgggtcggcacccgaaggatcacaattcgatgctcgtcaatatgatgctaagatgaatgagttacttggaactgatgggcaagatttttttacttcttatgacgaagtttgtgaaagctttgatgctatgggattgcaggagaaccttctgaggggtatttatgcatacggttttgagaagccctctgcaattcaacaaagggggattgttcctttctgcaaggggcttgatgttattcagcaagcacaatctggaactggaaaaactgccaccttttgttctggagttttgcagcagcttgattatagcttagttgaatgccaggcactggttcttgctcccactcgtgaacttgcacaacaaattgaaaaggtcatgcgagcactgggggactatcttggtgtcaaggtccatgtttgtgttggtgggaccattgttcgtgaagatcaacgcatcctctcaagtggggttcatgttgttgttggtactcctggtcgtgtatttgacatgctgtgcagacaatctttgcgccctgataacatcaggatgtttgtattggatgaggcagatgagatgctctctcgaggtttcaaggatcagatctatgatatttttcagctgctgccacctaagatccaggttggggttttctctgccacaatgcctcctgaagccctggaaatcacaaggaagtttatgaacaaacctgtgaggattcttgtaaaacgtgatgagcttaccttggaggggatcaagcaattttttgtcaatgtagacaaggaggattggaagctggagacactatgtgatctttatgaaacattggcaatcacccagagcgttatctttgtgaacaccagacgcaaagtagattggctgacagacaaaatgcggagtcgtgatcacacagtttcagccactcatggagatatggaccaaaacacaagggatatcatcatgcgggaattccgttctgggtcgtcccgtgttcttattaccacagatcttttggcccgtggtattgatgtccagcaagtctcacttgttataaattatgacctgccaactcagccagagaactatctccatcgaattggtcgtagtggacggtttgggagaaagggtgttgctatcaattttgtgacaggagatgatgaaaggatgctatttgacatccaaaagttttataatgtgcagattgaggagttgccagccaatgtagctgatctcatttga

SEQ ID NO: 355 - protein, 413 aa, Glycine max
MAGSAPEGSQFDARQYDAKMNELLGTDGQDFFTSYDEVCESFDAMGLQENLLRGIYAYGFEKPSAIQQRGIVPFCKGLDVIQQAQSGTGKTATFCSGVLQQLDYSLVECQALVLAPTRELAQQIEKVMRALGDYLGVKVHVCVGGTIVREDQRILSSGVHVVVGTPGRVFDMLCRQSLRPDNIRMFVLDEADEMLSRGFKDQIYDIFQLLPPKIQVGVFSATMPPEALEITRKFMNKPVRILVKRDELTLEGIKQFFVNVDKEDWKLETLCDLYETLAITQSVIFVNTRRKVDWLTDKMRSRDHTVSATHGDMDQNTRDIIMREFRSGSSRVLITTDLLARGIDVQQVSLVINYDLPTQPENYLHRIGRSGRFGRKGVAINFVTGDDERMLFDIQKFYNVQIEELPANVADLI

SEQ ID NO: 356 - DNA, 1829 bp, Gossypium raimondii
ctcctctctcaaactccgcggcgcagatccttaggagtttgggaaaccctatctctctctaaatatcaaccgaaaaaagctctcaaaaaactaccctttcttcccccctctctctctctctctctctctcactttctctcattctctttctttccaacctttctacactctttttttccccatcgctcctactgttttcatctgcttcaaggaatttccggttcctttttttttcttgcaaggtttattcttttatatttagttcgagatttgagaaatgaacaaatttgaagcattcctgctggatttatctctaaggaaaaagaactgatggattttgaagagaaaaggcgaacaaaaagggttgttgtttgtattttaggttccaaagatcatggcaggtttggcaccggaaggatcccaatttgatgctcgccaatatgatcagaaaatgactgagttgctccaaactgatggagatgattttttcacaagttatgatgaagtttatgacagttttgatgcaatgggacttcaagagaatcttctgaggggtatctatgcgtatggttttgagaagccttctgcaattcaacaacgaggtattgttccattttgcaagggtcttgatgtgattcagcaagcacagtccggaactgggaagacagcaactttctgctctggaattctacaacaacttgattatgctatggtccaatgccaggctctggttttggcacccactagggagttggcacaacagattgagaaagtgatgcgggcacttggtgattaccttggtgttaaggtccacgcttgtgtaggtgggacaagtgttcgtgaggaccagcgcattcttcaaagtggtgttcatgttgttgttggcactcctggtcgtgtctttgacatgttgagaaggcagtcactccgcccagattatattaagatgtttgttttggatgaggctgatgaaatgctttctcgtggttttaaggatcagatctacgatatcttccagctgctgccagccaagattcaggtgggagtattttctgccacaatgccacctgaagcccttgagatcactaggaagttcatgaacaaaccagtgagaattttggttaagcgtgatgagctcaccctcgagggtatcaagcagttttatgtgaatgttgaaaaggaggaatggaagcttgaaactctttgtgatctctatgagacccttgccatcacccagagtgtcattttcgtgaacacaagacgcaaggttgactggctaactgacaagatgcgaagccgtgaccacacagtttctgccacccatggagacatggaccagaacactcgtgacatcatcatgcgtgaattccgctccggttcttctcgtgttctcatcacaactgatctccttgctcgtggtattgatgtgcagcaagtgtctctagtcataaactatgatctgccgactcaaccagaaaactacctcccccgtatcggacgaagtggaaggtttggaaggaaaggtgttgccattaactttgtgactaatgatgacgagagaatgctgtatgacatccagaagttctacaatgtgatcattgaggagctgccttcaaacgtcgctgatctcctttgatgagattcccttttttggaagattatttgaggcaaagggttttgttgttttgcaagtcctaaaataacgtgcgctttttttgtggctttctttattttttttttcttcctttctagtttcttaagttaatgttgttcttaaaaacatatttgcccattatgatgatatggttcctgcacattttctagataaa

SEQ ID NO: 357 - protein, 413 aa, Gossypium raimondii
MAGLAPEGSQFDARQYDQKMTELLQTDGDDFFTSYDEVYDSFDAMGLQENLLRGIYAYGFEKPSAIQQRGIVPFCKGLDVIQQAQSGTGKTATFCSGILQQLDYAMVQCQALVLAPTRELAQQIEKVMRALGDYLGVKVHACVGGTSVREDQRILQSGVHVVVGTPGRVFDMLRRQSLRPDYIKMFVLDEADEMLSRGFKDQIYDIFQLLPAKIQVGVFSATMPPEALEITRKFMNKPVRILVKRDELTLEGIKQFYVNVEKEEWKLETLCDLYETLAITQSVIFVNTRRKVDWLTDKMRSRDHTVSATHGDMDQNTRDIIMREFRSGSSRVLITTDLLARGIDVQQVSLVINYDLPTQPENYLPRIGRSGRFGRKGVAINFVTNDDERMLYDIQKFYNVIIEELPSNVADLL

SEQ ID NO: 358 - DNA, 1490 bp, Hevea brasiliensis
gatggcaggtttggcaccagaaggatctcagtttgatgctaagcaatatgacaccaaaatgagtgaattactctcaaatgaaggccaagaattcttcacctcacaccatgaggtttatgacagttttgatgcaatgggattgcaagagaaccttctgaggggcatctatgcttatggttttgagaagccatctgcaatccagcaaaggggaattgttccattctgcaagggtcttgatgtaattcagcaggcccagtctggaaccggtaaaacagcaactttctgctctgggattctccagcaacttgattatggtctagtccaatgtcaggcactggtcttggctccgactagagaattggcgcaacagattgagaaagttatgcgagcccttggtgattatcttggtgtgaaggttcatgcttgtgtaggtggaacaagtgttcgtgaggatcaacgcattcttcaagctggtgttcatgttgttgtgggcactcctggtcgtgtgtttgacatgttgagaaggcagtcacttcgcccagattacattaggatgtttgtattggatgaggctgatgagatgctttcacgtggttttaaggatcagatctatgatattttccagttgctgccggcaaaagttcagattggtgtgttctctgctaccatgccaccagaggccctcgagatcacaaggaagttcatgaacaagcctgttaggatcttggttaagcgtgatgagcttacacttgagggtatcaagcagttctatgtcaatgttgagaaagaagaatggaaacttgaaacactatgtgatctgtatgaaacactagccatcacccagagtgtcatttttgttaacacaaggcgcaaggttgactggcttactgacaagatgcgaagccgtgaccatacagtatcagcaactcatggagatatggaccagaacactcgtgatatcatcatgcgagaattccgttctggctcttctcgtgttctcatcaccaccgatctcttggctcgtggtattgatgtgcagcaagtttccctcgtcataaactatgatctgccgactcaacccgaaaactaccttcatcgtattggaagaggcggacggtttggaagaaaaggtgttgccattaattttgtgacaagggatgatgagagaatgctgtttgacattcagaagttctataatgtggtcatcgaggagctgccatcaaatgttgctgatctcctgtaatgagaatttttggtgttttgagaaagggtttcttatttaatgtgttgtttttcctttcttgtttagtgtcttaatttaatattttcagacatatctgacagtttaatctcatatgggtcctcaattgcaacctgaagagattgtctagttgttatttacctttttaatatttttgccctcttggaaagttttgcatgttgggttttttgtactgtatacccccttttctataaattatcattgtggg

SEQ ID NO: 359 - protein, 413 aa, Hevea brasiliensis
MAGLAPEGSQFDAKQYDTKMSELLSNEGQEFFTSHHEVYDSFDAMGLQENLLRGIYAYGFEKPSAIQQRGIVPFCKGLDVIQQAQSGTGKTATFCSGILQQLDYGLVQCQALVLAPTRELAQQIEKVMRALGDYLGVKVHACVGGTSVREDQRILQAGVHVVVGTPGRVFDMLRRQSLRPDYIRMFVLDEADEMLSRGFKDQIYDIFQLLPAKVQIGVFSATMPPEALEITRKFMNKPVRILVKRDELTLEGIKQFYVNVEKEEWKLETLCDLYETLAITQSVIFVNTRRKVDWLTDKMRSRDHTVSATHGDMDQNTRDIIMREFRSGSSRVLITTDLLARGIDVQQVSLVINYDLPTQPENYLHRIGRGGRFGRKGVAINFVTRDDERMLFDIQKFYNVVIEELPSNVADLL

SEQ ID NO: 360 - DNA, 1446 bp, Helianthus exilis
ggggatccatctcaacatctttactctctcaacaactccacggccactccgaggagttttgagaaaaccctaaaaagcctccactaaaatctctttaactttctcttctaaatcttttcatcaatcttcgaatcagtcatggcaggcgcagcaccggaaggttctcagtttgacacccgtcactttgattcaaaaatgaacgagttgctttctactgatggacaggacttctttacatcatatgacgaggtttatgatagctttgatgctatgggtttgcaagaaaacttattaagaggcatctatgcatacggttttgaaaagccatcagcaattcaacaaaggggaattgtcccattcaccaagggtcttgatgtaattcaacaagctcaatcaggaaccggaaagacagcaaccttttgctctggtattcttcagcaacttgactacaatgtagtggagtgtcaggctttggttctggctccaacccgtgaacttgcacagcaaattgagaaagttatgcgggcccttggtgactaccttggtgtgaaggttcatgcttgtgtgggtggaaccagtgttcgtgaggaccaacgcatcctctcagctggggtccacgttgttgttggtacacctggacgtgttttcgacatgcttaggaggcagtcactacgtgctgattacatcaagatgtttgtgttggatgaagctgatgaaatgctttcaagaggattcaaggatcagatctatgacatctttcagctgttgccatcgaaggttcaggttggagtgttctctgcaaccatgccacctgaagccctcgaaatcacaagaaagtttatgaacaaacccgtaagaatccttgtgaaacgtgatgaactcaccctagaaggtatcaaacagttttacgtcaatgtcgaaaaggaagaatggaaacttgaaaccctatgtgatctttacgaaaccttagcaatcacacaaagtgtcattttcgtcaacacccgacgaaaagttgactggttgaccgacaagatgcgtagccgagaccacacagtctccgcgacacacggtgacatggaccaaaacacccgtgacatcatcatgcgtgagttccgatctggttcatcacgtgtgttgaccaccactgatcttttggcgcgtggtattgatgtccaacaagtgtcacttgtgatcaattatgatcttcctacacaaccagaaaattatcttcaccgtatcggacgaagtgggcgatttgggagaaagggtgttgcgattaattttgtgacgttggatgatgaacggatgcttgctgatattcagaagttttataatgtggtggttgaggagttgccgtccaatgttgctgatctgatttagaaaatgatcttgggatgttgggctggcttgtttaaataagaagggtcaaaggttacaacctgtttt

SEQ ID NO: 361 - protein, 413 aa, Helianthus exilis
MAGAAPEGSQFDTRHFDSKMNELLSTDGQDFFTSYDEVYDSFDAMGLQENLLRGIYAYGFEKPSAIQQRGIVPFTKGLDVIQQAQSGTGKTATFCSGILQQLDYNVVECQALVLAPTRELAQQIEKVMRALGDYLGVKVHACVGGTSVREDQRILSAGVHVVVGTPGRVFDMLRRQSLRADYIKMFVLDEADEMLSRGFKDQIYDIFQLLPSKVQVGVFSATMPPEALEITRKFMNKPVRILVKRDELTLEGIKQFYVNVEKEEWKLETLCDLYETLAITQSVIFVNTRRKVDWLTDKMRSRDHTVSATHGDMDQNTRDIIMREFRSGSSRVLTTTDLLARGIDVQQVSLVINYDLPTQPENYLHRIGRSGRFGRKGVAINFVTLDDERMLADIQKFYNVVVEELPSNVADLI

SEQ ID NO: 362 - DNA, 1736 bp, Hordeum vulgare
cggcacgaggcccaccgcgagcgcttcagccatggcaggaatggcaccagagggttcccagtttgatgctaagcactatgacagtaagatgactgagttactgaaccaaggtgacactgaggagtttttcacctcatatgatgaggtgcatgaaagttttgatgacatgggcctccaagagaaccttcttagaggcatctatgcttatggttttgagaagccatcagccattcagcaaagaggaattgttcccttctgcaagggtcttgatgtgattcaacaagctcagtctggtacaggaaaaactgccaccttctgttctggaatcttgcagcagcttgactatggattggttgagtgccaggcattggtccttgctccgacccgtgagcttgcacagcagattgagaaggtcatgcgtgctcttggtgactacttaggcgtcaaggtgcatgcatgtgttggtggaacttctgtccgtgaggatcagaggattcttgccagtggtgtgcatgttgttgtcggcacacctggtcgtgtgttcgatatgttgcgcaggcaatccctccgcccagataacatcaagatgtttgtgttggatgaagctgatgagatgctatcacgtggtttcaaggatcagatctatgatatcttccagcttcttccatcaaagattcaggttggggtgttctctgctaccatgcctcctgaggctcttgagataacccgcaagttcatgaacaagcccgtgaggattcttgtcaagagagatgagcttacccttgagggtatcaagcaattctatgtcaatgttgagaaggaagagtggaagctggacacactctgtgacctgtacgagaccttggcaattacccagagtgtcatctttgtgaacacccgccgcaaggtggactggctcaccgacaagatgaggggaagggaccacactgtctctgcaacacacggagacatggaccagaacactagggacatcatcatgagggagttcagatctggctcttctcgtgtgctcatcaccaccgacctgctggcccgtggtattgatgtgcagcaagtctcccttgtcatcaactatgacctgccgacccagcctgagaactacctccatcgcattggtcgtagtggtcggttcgggaggaagggagttgccatcaacttcgtcacccgtgaagatgagaggatgctgttcgacatccagaagttctacaacgtggtcattgaggagctcccggccaatgtcgccgaccttctctagattattatcataggaatgcagtaaggtgctcgataaagttcgtttttgttgaatatctcccaactctcagttttggagtggtaaggtctggttctgtttgaatcgcggttaaggatcgagtttttttttttcttgttatgcaatgtccggaaatttttgtagtgcgtaggctgtgccaactcccgggctagctgggatagagtgacactgatggagtttttacttctcgttgtgaagctattttattgcccctctgtttttaaaaaaaaaaaaaaaaaaaaaaaaaaatttcctgcggccgagaacgcgcacccgccctccagacctcctccgccgccgtcgttccgcagccccaccgccgccgtcgacatgggtaaggtgcacggatcgctggcccgtgccgggaaggtgcgcgggcagacgcccaaggtggcgaagcaggacaagaagaagcagcccc

SEQ ID NO: 363 - protein, 414 aa, Hordeum vulgare
MAGMAPEGSQFDAKHYDSKMTELLNQGDTEEFFTSYDEVHESFDDMGLQENLLRGIYAYGFEKPSAIQQRGIVPFCKGLDVIQQAQSGTGKTATFCSGILQQLDYGLVECQALVLAPTRELAQQIEKVMRALGDYLGVKVHACVGGTSVREDQRILASGVHVVVGTPGRVFDMLRRQSLRPDNIKMFVLDEADEMLSRGFKDQIYDIFQLLPSKIQVGVFSATMPPEALEITRKFMNKPVRILVKRDELTLEGIKQFYVNVEKEEWKLDTLCDLYETLAITQSVIFVNTRRKVDWLTDKMRGRDHTVSATHGDMDQNTRDIIMREFRSGSSRVLITTDLLARGIDVQQVSLVINYDLPTQPENYLHRIGRSGRFGRKGVAINFVTREDERMLFDIQKFYNVVIEELPANVADLL

SEQ ID NO: 364 - DNA, 1634 bp, Lotus japonicus
tgtcaaaagcaggcggcacggtccggaatcctcgagcatgcttgtaagtgggggcttcctcaactccacggcgcagatccgaggagttttctcttcgctattccctgcttccttctccgattccctattccgctaccaaccttcaacgctccctcagtgatggcaggtgttgctcccgaaggatctcaatttgatgctcgccagtatgacgctaagatgagtgatttgctttcttctgatgggcaagatttcttcacctcatatgatgaagtctatgatagctttgacgcaatgggattgcaagaaaatcttctgagaggcatttatgcttatggttttgagaggccttctgcaatccagcaaaggggaattgttcctttctgcaaaggtctggatgtgattcagcaggctcagtctggaactgggaagactgcaacattctgttctggaattttgcagcagcttgattatggattggttcagtgccaggctttggttttggcaccaacaagggagctggcacaacagattgagaaggtcatgcgagcacttggtgattaccttggtgttaaggttcatgcttgtgttggtgggacaagtgttcgtgaggatcagcgcattctccaagctggtgtccacacagttgttggcactccagggcgtgtgtttgacatgctgcggaggcagtctcttcgccctgatagcataaagatgtttgttttggatgaggctgatgaaatgctttcacgtggtttcaaggatcagatctatgacatcttccagctgctgccaggcaaaattcaggttggagtgttctctgctacgatgccacctgaagcacttgagattaccaggaagttcatgaacaagccagtgagaatcctggtaaagcgtgacgaactgaccctggagggtatcaagcagttctatgtcaatgttgagaaggaggagtggaagctggagacactatgcgacctctatgagaccttagctatcacccagagtgtcatctttgtgaacaccaggcgcaaggtggactggctcactgacaagatgcggagcaatgatcacaccgtctcagccacccacggtgacatggaccagaacaccagggacatcatcatgcgtgaattccggtccggctcctctcgagttctcatcaccactgacctcctggcccgtggtattgacgtgcagcaagtgtctctagtcataaactatgacctcccaactcagcctgaaaactatctccatcgtattggtaggagtgggcgtttcggaagaaaaggtgttgctataaactttgtgacattggatgattccaggatgctgtctgatattcagaagttctacaatgtgactgtggaggagctgccatccaatgttgctgatctgctctgatgagttaaatttttgctctctgttaagtcatcggggatttttctgctggacaagtgctattttaagttattcaggtcttctttttaatatattttactcatgagattaaagacatccatctgatgctatttgtagtggattctttaaaatttgtttgattagttatcaggattctgtttaagcctgcatgtattttcatttgtctcctttctatttcttgttatttttgtggc

SEQ ID NO: 365 - protein, 413 aa, Lotus japonicus
MAGVAPEGSQFDARQYDAKMSDLLSSDGQDFFTSYDEVYDSFDAMGLQENLLRGIYAYGFERPSAIQQRGIVPFCKGLDVIQQAQSGTGKTATFCSGILQQLDYGLVQCQALVLAPTRELAQQIEKVMRALGDYLGVKVHACVGGTSVREDQRILQAGVHTVVGTPGRVFDMLRRQSLRPDSIKMFVLDEADEMLSRGFKDQIYDIFQLLPGKIQVGVFSATMPPEALEITRKFMNKPVRILVKRDELTLEGIKQFYVNVEKEEWKLETLCDLYETLAITQSVIFVNTRRKVDWLTDKMRSNDHTVSATHGDMDQNTRDIIMREFRSGSSRVLITTDLLARGIDVQQVSLVINYDLPTQPENYLHRIGRSGRFGRKGVAINFVTLDDSRMLSDIQKFYNVTVEELPSNVADLL

SEQ ID NO: 366 - DNA, 1680 bp, Lotus japonicus
cccacgcgtccgaaacgcactcttcgcaatctctttctctttcctcaactccgcggcttagatctgaggagtttgggaaaccctaaccgcctctctccgataacactctccgcctccgctctcttctccgatcaaccaccgcttccatcaccgtcagtatggctggactcgcaccggaaggctcgcagtttgatgcaaagcattatgataccaagatgagtgaattgcttactactgaaggacaggacttcttcacctcctatgatgaggtttatgagagttttgatgctatgggccttcaagagaacttgctgagaggcatttatgcatatggttttgagaagccctcagctattcagcaaagaggaatagttccattctgcaagggacttgatgttatacaacaggctcagtctggaactgggaaaacagcaactttctgttctgggattttgcagcaacttgactacagtttgactgaatgccaagccttggttctagcaccaactcgggagcttgctcagcagattgagaaagttatgcgagcacttggagactatctaggtgtcaaggtgcatgcttgtgttggaggtaccagtgttcgtgaagaccaacgcattctatcaagcggtgttcatgttgttgttggtactcctggtcgtgtatttgatatgcttcgcaggcagtcacttcgaccagataacatcaagatgtttgtattggatgaggctgatgaaatgctttcacgtggttttaaagatcagatctacgatatattccaactgctgccatccaagattcaagttggagttttctctgctacaatgcctcctgaggctcttgaaatcaccaggaagtttatgaacaaacctgtaaggatccttgtgaagcgtgatgagctcaccttggagggtattaagcagttttacgtcaatgttgaaagagaggaatggaagctcgatacactctgtgatctttatgagacattggcaatcactcagagtgtcatttttgtgaacaccagaaggaaggttgattggctgactgacaagatgcgaagcagagaccacacagtctcggcaacccatggagacatggaccagaataccagagatattattatgcgagaattccgttctgggtcttcccgtgttttaatcactactgatcttttggctcgtggtattgatgtgcagcaagtatctttggttataaattatgatctcccaacacagcctgagaactatctccatcgtattggtcgtagtggaaggtttgggaggaaaggtgttgccatcaactttgtcacaaaggatgatgaaagaatgctgtttgacatccagaagttctacaatgtggtagttgaggagctgccttcaaatattgctgaactactttgaggtgttagtcttcaaacataattagtggaaagttggtttctgaggtaagtgttatgtaatgtttttctttttttgggcctttttttgttgtatttctggttttgaactttgtttaaccttttaggtaggtgtagtaatttaatttacattattaatcgtctgaatgtttgaagtgataagtactttgtgatgtgaaatcccattattagtcgaattagtgtattggtcgttgttccttttctaacaagcaagcttcttaatatatgtttaagttataacc

SEQ ID NO: 367 - protein, 413 aa, Lotus japonicus
MAGLAPEGSQFDAKHYDTKMSELLTTEGQDFFTSYDEVYESFDAMGLQENLLRGIYAYGFEKPSAIQQRGIVPFCKGLDVIQQAQSGTGKTATFCSGILQQLDYSLTECQALVLAPTRELAQQIEKVMRALGDYLGVKVHACVGGTSVREDQRILSSGVHVVVGTPGRVFDMLRRQSLRPDNIKMFVLDEADEMLSRGFKDQIYDIFQLLPSKIQVGVFSATMPPEALEITRKFMNKPVRILVKRDELTLEGIKQFYVNVEREEWKLDTLCDLYETLAITQSVIFVNTRRKVDWLTDKMRSRDHTVSATHGDMDQNTRDIIMREFRSGSSRVLITTDLLARGIDVQQVSLVINYDLPTQPENYLHRIGRSGRFGRKGVAINFVTKDDERMLFDIQKFYNVVVEELPSNIAELL

SEQ ID NO: 368 - DNA, 1469 bp, Lactuca perennis
cactcaaattccctcaactccacggccacccgaggagtttgagaaaaccctaaaaagcctcctcaaaaatctcaactttttctctaaatctttccaccaatctgcaaatcagtcatggcaggcgctgcaccagaaggttcccagtttaatgctcagcagttcgattccaaaatgaatgaattgctttcaaccgatggacaagactttttcacctcatacgatgaagtttacgatagtttcgatgccatgggcttacaagaaaacctcttgagaggcatctacgcatatggttttgaaaaaccatctgcaattcaacaaaggggaatagtcccattctgcaagggtctagatgtgatccaacaagctcaatcaggaacaggaaaaaccgcaactttttgctcaggaatccttcaacaactcgactacaatgtagtcgagtgtcaagctttggttctcgcacccactcgtgaactcgcacaacaaattgaaaaagtcatgcgggccctcggcgactacctcggagtcaaagtccatgcgtgcgtgggcgggaccagtgtccgtgaggatcaaagaatcctctcggctggggtccacgtggttgttgggacacctggacgtgtcttcgacatgcttaggaggcagtcacttcgcgctgattacatcaaaatgtttgttttggacgaagctgatgaaatgctctcacgtggtttcaaagatcagatctatgatatcttccagttgcttccatcgaaagtgcaagtcggtgtgttttccgctacaatgccacccgaagccctagaaatcacccggaaattcatgaacaaacccgtgagaattttggtgaaaagagacgaacttacccttgaaggaatcaaacaattttatgtcaatgtggagaaagaagaatggaaactcgaaacgctatgtgacctttacgaaaccctagcgattacccagagtgtcattttcgtaaatacgcgtcggaaggttgactggttgaccgacaaaatgcgttcccgggaccacacggtgtcggctacccacggtgacatggaccagaacacgcgtgacatcatcatgcgggagtttcgatcggggtcttcacgtgtgttgataactacagatcttttggcacgtggaattgatgtgcaacaggtgtcacttgttatcaactatgatctgccaactcagcctgagaattatcttcataggattgggcgaagtgggaggtttgggagaaagggtgtggcgattaattttgtgactttggatgatgaacggatgcttgcggatattcagaagttttataatgttgtggtggaggagttgccttcaaatgttgcggatctcatataagattgtgaagtaagaaagaaaaaaggtttagaggttgtttttgggattttactatttactattattactattattgttattgttatcagttttgtttggtttaagttatggtt

SEQ ID NO: 369 - protein, 413 aa, Lactuca perennis
MAGAAPEGSQFNAQQFDSKMNELLSTDGQDFFTSYDEVYDSFDAMGLQENLLRGIYAYGFEKPSAIQQRGIVPFCKGLDVIQQAQSGTGKTATFCSGILQQLDYNVVECQALVLAPTRELAQQIEKVMRALGDYLGVKVHACVGGTSVREDQRILSAGVHVVVGTPGRVFDMLRRQSLRADYIKMFVLDEADEMLSRGFKDQIYDIFQLLPSKVQVGVFSATMPPEALEITRKFMNKPVRILVKRDELTLEGIKQFYVNVEKEEWKLETLCDLYETLAITQSVIFVNTRRKVDWLTDKMRSRDHTVSATHGDMDQNTRDIIMREFRSGSSRVLITTDLLARGIDVQQVSLVINYDLPTQPENYLHRIGRSGRFGRKGVAINFVTLDDERMLADIQKFYNVVVEELPSNVADLI

SEQ ID NO: 370 - DNA, 1834 bp, Lactuca sativa
ttcggccttatggcctgtagccgggggcactcaaattccctcaactccacggccacccgaggagtttgagaaaaccctaaaaagcctcctcaaaaatctctcaactttttctctaaatctttccaccaatctgcaaatcagtcatggcaggagcagcaccagaaggttcccagtttaatgctcagcaatttgattccaaaatgaatgaattgctttcaaccgatggacaagactttttcacctcatacgatgaagtttatgatagttttgatgccatgggtttgcaagaaaacctcttgagaggcatctatgcatatggttttgaaaaaccatctgcaattcaacaaaggggaatagtcccattctgcaagggtcttgatgtgatccaacaagctcaatcaggaacaggaaagactgcaactttttgctctggaatccttcaacagcttgactacaatgtagtcgagtgtcaagctttggttcttgcacccactcgtgaacttgctcaacaaattgaaaaagtcatgcgggccctaggggactaccttggagtcaaagtccacgcgtgcgtgggtgggaccagtgtccgtgaggatcaaaggatcctctctgctggggtccacgtggttgttggtacacctggacgtgtctttgacatgctcaggaggcagtcactacgtgccgattacatcaagatgtttgtcttggatgaagctgatgaaatgctctcaagaggtttcaaagatcagatttatgatatcttccagttgttgccatcgaaagtccaagtgggtgtgttctccgctacaatgccaccagaagctttagaaatcacccggaaattcatgaacaaacccgtgagaattctcgtgaaaagagacgaacttaccctcgaaggtatcaaacagttttacgtgaacgttgaaaaggaagaatggaaactcgaaacactctgtgacctttacgaaaccctagcaatcacccagagtgtcattttcgtaaatacgcgtcgaaaggttgactggttgaccgacaaaatgcgttcccgggaccacactgtgtccgccacccacggtgacatggaccaaaacacgcgtgacatcatcatgcgggagtttcgatcgggatcttcacgtgtgttgatcactacagatcttttggcacgtgggattgatgtgcaacaggtgtcacttgttatcaattatgatcttccaacacagcctgagaattatcttcataggattgggcgaagtgggaggtttgggagaaagggtgtggccattaattttgtcactttggatgatgaacggatgcttgcggatattcagaagttttataatgttgtggtggaggagttgccttccaatgttgcggatctcatataagattgtgaagtaagaaagaaaaaggtttagaggttgtttttgggatttactaatactatttactattattattattattattgttattgttatcggttttgtttgttttaagttatgtttatgatgatggtggaagactttttgtgttataagatattatgcgaattggcaatgtgtttcttcttgttgtgttgccaatttttgcgacttgtgtttgtacttttgaaagtttcctttttacctttaaaaaaaaaaaataaaaaagaaacccccaaaatgggaaggggaaacccccccccccaaaattgttaaaatttttgaaaattccaaaaaaatatttttctcgccccgcttgggccccgtaaattctaaattccagggggtttatgcatggggccgcatttccaacacacggaatggggggcctttttacaaggtctagtccgacc

SEQ ID NO: 371 - protein, 413 aa, Lactuca sativa; identical to SEQ ID NO: 369

SEQ ID NO: 372 - DNA, 1728 bp, Mesembryanthemum crystallinum
  misc_feature (1455)..(1455): n is a, c, g, or t
  misc_feature (1472)..(1472): n is a, c, g, or t
  misc_feature (1554)..(1554): n is a, c, g, or t
gcttatagatccgaggattttggaaaccctaattttctcccaacacacaaacatcttttacgcctctctttctcctctcgatccactttcgcttcatatttcatctctctacttgttctgtcatggctgctgtacccgaaggatcacagtatgatactcgtcagtatgatacaaagatgagcgaattgcttgacactgacgtggatcaatttttcacctcgtacgatgaggtttatgaaacttttgatggcatgggtttgcaagagaatcttctgagaggaatttatgcatatggttttgagaaaccttctgctattcaacaaaggggcatagttccattttgcaagggtcttgatgttatccaacaagctcagtccggaactggaaaaacagcaaccttctgctctggcattctgcaacaacttgactacagtttagtccagtgccaagcattggtattggcacccactagagagcttgctcaacagattgagaaggttatgcgagctcttggtgattatcttggtgtgaaggtccatgcttgtgttggtggaaccagtgtccgtgaggatcaacgtatactacaaagtggtgtccatgttgtcgtcggtaccccaggtcgtgtttttgacatgttacgaaggcagtcacttcgttctgatagcattaagatgtttgtgatggatgaagctgatgagatgctttcacgaggtttcaaagaccagatttacgacatattccagctactcccaccagagattcaaatcggtgtgttttctgcaaccatgccaccagaagctttggaaatcacccgtaagttcatgaagaagcccgttcggatcttggtgaagcgtgacgagctcactttggagggtatcaaacaattctacgtcaacgttgacaaggaagaatggaagcttgaaaccctctgtgatctttacgaaaccctagccatcacccagagtgtgatcttcgtcaacacaaggcgtaaggtcgattggctcacggacaacatgcgaagccgtgaccacacagtctcggccacccacggagacatggaccagaacactagggacatcatcatgcgtgagttccgttctgggtcttctcgtgttctcatcaccaccgatctcctggctcgtggtattgatgtccagcaggtgtcccttgtcataaactacgatctcccaactcagccagagaactaccttcaccgtatcggtagaagtggaagattcggaagaaagggagttgctatcaactttgtgacccatgatgacgaaagaatgctcgctgatatccagaggttctacaacgtaacagttgaggagctgccagcaaacgtcgccgatcttatctgatgagctctctctctctctttcttcttttttccaggtttctgttctaatcgacagtttttgcccacttcataatctcattaagacatccaaaganaatggatccagaatgtngctgcctacttatttacatatttttggatatgtaggtgatagttgctgggcaggggtctctatgcccattcttatgtgtagntaggaagattcttattttatactactacttagcttccctcaaattttctgttctttctacccttgctttaatttaaaaatagtagccatttaaaaggagtgatccgattgttgaagcaaaaaaatttggctgggaaatttttggttttgaatgaataccatggattttggttcc

SEQ ID NO: 373 - protein, 412 aa, Mesembryanthemum crystallinum
MAAVPEGSQYDTRQYDTKMSELLDTDVDQFFTSYDEVYETFDGMGLQENLLRGIYAYGFEKPSAIQQRGIVPFCKGLDVIQQAQSGTGKTATFCSGILQQLDYSLVQCQALVLAPTRELAQQIEKVMRALGDYLGVKVHACVGGTSVREDQRILQSGVHVVVGTPGRVFDMLRRQSLRSDSIKMFVMDEADEMLSRGFKDQIYDIFQLLPPEIQIGVFSATMPPEALEITRKFMKKPVRILVKRDELTLEGIKQFYVNVDKEEWKLETLCDLYETLAITQSVIFVNTRRKVDWLTDNMRSRDHTVSATHGDMDQNTRDIIMREFRSGSSRVLITTDLLARGIDVQQVSLVINYDLPTQPENYLHRIGRSGRFGRKGVAINFVTHDDERMLADIQRFYNVTVEELPANVADLI

SEQ ID NO: 374 - DNA, 1530 bp, Malus domestica
ctactttcaaactccacggcgcagatccgaggagtttgggaaaccctagctctcttttagcaacctccaattgtcctctacttctctctctagcgctcatcaacatcatcagtcatggcaggtgttgcacccgagggatcacaatttgatgcaaaacagtatgatactaagatgagtgagctgctctcaactgatgggcaagatttcttcacatcgtatgatgaagtttttgaaagttttgatgccatgggattgcaggaaaatctgctgagaggcatttatgcttatggttttgagaagccttctgcaattcagcaaaggggaattgttccattctgcaaaggccttgatgtgattcaacaggctcagtctggaaccgggaaaacagcaaccttttgctcagggattttgcagcaacttgattatggtgttgtccagtgccaggccttggttttggctcctaccagggagttggcacagcagattgagaaggttatgcgagcacttggtgactaccttggcgttaaggttcatgcttgtgttggtgggacaagtgttcgtgaggatcagcgcattcttcaagctggtgttcatgttgttgttggaacccctggtcgtgtgtttgacatgttgaggaggcagtcgcttcgcccagattacattaagatgtttgtattggatgaggctgatgaaatgctttctcgtggttttaaggatcagatctacgacattttccagcttttgccatcaaaggttcaggttggggtgttctctgctaccatgccacctgaagcccttgaaatcactagaaagtttatgaacaaacctgtgaggattttggtaaagcgtgatgagctcacccttgagggtatcaagcagttctatgtcaatgtcgataaagaagaatggaagctcgagaccctttgtgatttgtatgagactctggccatcacccagagtgtcatttttgttaacaccaggcgcaaggtggactggcttaccgacaagatgagaagccgtgaccacactgtctctgccacccatggtgacatggaccagaacactcgtgatatcatcatgcgtgaattccgatcaggctcatcccgtgttctcatcaccactgatctcttggctcgtggtattgatgtgcagcaggtatctctcgtaatcaactatgatttgccgactcaacctgaaaactaccttcatcgtattggacgaagtggtagatttggaaggaagggtgttgctattaactttgtgacaaaagacgacgagagaatgctctatgacatccagaggttttacaacgtggtgattgaggagctcccatcgaatgtggccgatcttctctgaagaactcgcgcattttgttcccccgcttatctttttgaggcagatttttattatcctgttttgaaagtactgtttaatgctgctgcttttcattttgttttgtcctcaatttatgctgtcaaacatatctaactgttcaatggtatgcgccttcttgctcggtttccctcgtgc

SEQ ID NO: 375 - protein, 413 aa, Malus domestica
MAGVAPEGSQFDAKQYDTKMSELLSTDGQDFFTSYDEVFESFDAMGLQENLLRGIYAYGFEKPSAIQQRGIVPFCKGLDVIQQAQSGTGKTATFCSGILQQLDYGVVQCQALVLAPTRELAQQIEKVMRALGDYLGVKVHACVGGTSVREDQRILQAGVHVVVGTPGRVFDMLRRQSLRPDYIKMFVLDEADEMLSRGFKDQIYDIFQLLPSKVQVGVFSATMPPEALEITRKFMNKPVRILVKRDELTLEGIKQFYVNVDKEEWKLETLCDLYETLAITQSVIFVNTRRKVDWLTDKMRSRDHTVSATHGDMDQNTRDIIMREFRSGSSRVLITTDLLARGIDVQQVSLVINYDLPTQPENYLHRIGRSGRFGRKGVAINFVTKDDERMLYDIQRFYNVVIEELPSNVADLL

SEQ ID NO: 376 - DNA, 1534 bp, Manihot esculenta
ctccaaggcgcagatccgaggagtttgggataaaaaaccctagttttctctctctactctcaaaaaaccatccaaatctctctacgtctctttacaaatcacctcactatcagtcatggcaggtttggcaccagaaggatcacagtttgatgctaagcaatatgatgccaaaatgaatgaattgctctcaactgatggacaagaattcttcacctcgtatgatgaggtttatgatagttttgatgcaatgggattgcaagagaaccttctgagaggcatctatgcttatggttttgagaagccttctgcaatccagcaaaggggaattgttccattctgcaagggccttgatgtaattcagcaggctcagtctggaactggaaaaactgcaactttctgctctggcattctccagcaacttgattatggtctagtccaatgtcaggcattggtcttggcacccactagagaactggcacaacagattgagaaggttatgagagcccttggtgattatcttggtgtgaaggttcatgcttgtgtaggtggaacaagtgttcgtgaggatcaacgcattctccaagctggtgttcatgttgttgtgggtacaccaggtcgtgtgttcgacatgttgagaaggcagtcacttcgcccagactacataaagatgtttgtattggatgaggcagatgagatgctttcccgtggttttaaggatcagatatatgacattttccagttgctgccagcaaaagttcaggtcggtgtgttctctgctaccatgccaccagaggcccttgagatcacgaggaaattcatgaacaagcctgtgaggatcttggttaagcgtgatgagcttacccttgagggtatcaagcagttctatgtcaatgttgagaaggaagaatggaaacttgaaacgctatgtgatctgtatgagacactagccatcacccagagtgtcatctttgtaaacacacggcgcaaggttgactggcttactgacaagatgcgaagccgtgatcacacagtatcagcaactcatggagatatggaccagaacactcgcgatatcatcatgcgggaattccgttctggctcttctcgtgttctcatcaccactgatcttttggcgcgtggtattgatgtccagcaagtttcccttgtcataaactatgatctgccgactcaacctgaaaactaccttcatcgtattggacgaggtggacgattcggaagaaaaggtgtggccattaattttgtgacaagggatgatgagagaatgctgtttgacattcagaagttctacaatgtggtcatcgaggagctgccatctaatgttgctgatctcctgtgatgagaaatttttggtgttgaggaaagggtttcttatttaatgtgctgtcttctcccttcttgtttagtgtcttaatttaaaatcttcagacatatttgacagttgttcaatctcatatgaggcttcttctcaattgcaacctgatgatattgtctagtccttattttgtcctcttgg

SEQ ID NO: 377 - protein, 413 aa, Manihot esculenta
MAGLAPEGSQFDAKQYDAKMNELLSTDGQEFFTSYDEVYDSFDAMGLQENLLRGIYAYGFEKPSAIQQRGIVPFCKGLDVIQQAQSGTGKTATFCSGILQQLDYGLVQCQALVLAPTRELAQQIEKVMRALGDYLGVKVHACVGGTSVREDQRILQAGVHVVVGTPGRVFDMLRRQSLRPDYIKMFVLDEADEMLSRGFKDQIYDIFQLLPAKVQVGVFSATMPPEALEITRKFMNKPVRILVKRDELTLEGIKQFYVNVEKEEWKLETLCDLYETLAITQSVIFVNTRRKVDWLTDKMRSRDHTVSATHGDMDQNTRDIIMREFRSGSSRVLITTDLLARGIDVQQVSLVINYDLPTQPENYLHRIGRGGRFGRKGVAINFVTRDDERMLFDIQKFYNVVIEELPSNVADLL

SEQ ID NO: 378 - DNA, 2032 bp, Marchantia polymorpha
ctgtgcgccgccgtctctcacaagagaaactcttgcacatcatccccccccaaatcaatcgacagcatggcaggtttggctccagaaggatctcagtttgacgcccgacagtatgaccagaagatggaccaagttcttaaccaggaaggagaagactttatctccacctgggatgaggttcacgagaccttcgatgctatgggtctccacgagaacttgttaaggggcatctacgcctacggtttcgagaagccgtctaccattcaacaacgtggtatcgtccccttctgcaagggtttggacgtcattcagcaggcacaatctggaacgggaaagaccgctactttctgttcaggtatcttgcagcagctcgattataatctggttgagtgccaggctctagttctggctcctactcgtgagttggctcagcagattgagaaggttatgagggcacttggagactaccttcaagtgaaggtgcacgcctgtgtcggtggaaccagtgtgcgtgaggatcagcgaatcctccaagccggagtacatgttgttgttggtactcctggtcgtgtgtacgatatgttaaggcgccatgccctgagacccgagtcaatcaagtgctttgtcctcgatgaggctgatgaaatgttatcccgaggattcaaggaccagatttacgatatcttccagcttctgccacagaagcttcaggttggagttttctcagcaacaatgcccccagaggcactcgagatcaccaggaagttcatgaacaagccagttaagattcttgtaaagagagatgaacttaccctggagggtattaagcagttctatgtaaatgttgacagggaagaatggaagcttgataccttatgcgatctctacgagacgctggccatcacccagagtgtcatcttcatcaacaccaggaggaaggtcgactggttgaccgataagatgcgcgcacgagaccataccgtctccgccacccacggtgacatggaccagaacacccgtgatatcatcatgagggagttccgttctggatcatcgcgtgttttgatcaccaccgatctgttggctcgtggtatcgacgttcaacaagtatcccttgttattaactacgacttacccacccagcccgagaactacctccaccgtattggacgaagtggtcgattcggaaggaagggagttgccatcaattttgtcaccaaggaagatgagaggatgctgcaggacatccagcgcttctacaacaccgtcatcgaagagcttccatccaacgtcgctgatcttctctaagttgtgattgttgatgaagggctgacaacaccgagtatcttgagctaacatgagtcaacagctggtgcccgaggattgctgttgcaagtatgatcggctcatcttttgtaacacaagtgtcgagggagggtgacctttgtatcacaagtgtcaagggagggtgattattagccaatttgggatgtactcatgcctgagtaatcaaatgaggtagaggggctggcatggataatatcaagcgatggcggggttttgcacggagtggtgtgattttccaggtctggtcaagcactccattcgatgtattgctacattcagtaaggaagaggctgtacatcttagctattgagcttaattgactcgccttttgcgaggctagtcagtgaggcgttcttttaggaatgtgctttttctttaggaccgtgatcgaacaacaacattgcatttaaaagtgcactcttgaaatttacaggtttctttgagctgtgtgtgttgagggaaatgcgatgagttgaataattaagttatttttgttaatgaggtgtaggcaaaaagattttcggtacaaacaccctcaaatcctacgtttacgattgtttaatattttgatgagaatatagacaggactttacttaaaaatctacaagacggtgtcatgtctcaaaattatcgtgactgttgagtgtaaactttgaagatgaatttgagtttggttatatctctc

SEQ ID NO: 379 - protein, 413 aa, Marchantia polymorpha
MAGLAPEGSQFDARQYDQKMDQVLNQEGEDFISTWDEVHETFDAMGLHENLLRGIYAYGFEKPSTIQQRGIVPFCKGLDVIQQAQSGTGKTATFCSGILQQLDYNLVECQALVLAPTRELAQQIEKVMRALGDYLQVKVHACVGGTSVREDQRILQAGVHVVVGTPGRVYDMLRRHALRPESIKCFVLDEADEMLSRGFKDQIYDIFQLLPQKLQVGVFSATMPPEALEITRKFMNKPVKILVKRDELTLEGIKQFYVNVDREEWKLDTLCDLYETLAITQSVIFINTRRKVDWLTDKMRARDHTVSATHGDMDQNTRDIIMREFRSGSSRVLITTDLLARGIDVQQVSLVINYDLPTQPENYLHRIGRSGRFGRKGVAINFVTKEDERMLQDIQRFYNTVIEELPSNVADLL

SEQ ID NO: 380 - DNA, 1242 bp, Medicago truncatula
atggcaggtttagctccagaaggttcgcaatttgataccaagcagtttgacactaagatgaatgaattgctttccactgaaggacaagaattcttcacctcatacgatgaagttcatgaaacttttgatgcaatgggattgctagaaaatcttctgagaggcatatatgcttatggttttgagaagccatctgcaatacagcaaaggggaattgttcctttcatcaagggtctcgatgtgattcagcaggctcagtcaggaaccggaaagacagcgacgttctgttctggaattttgcagcagcttgattatggtttggttcagtgccaggctttggttttggccccaacaagggagctggcacagcagattgagaaggttatgagagcacttggtgactaccttggtgttaaggttcatgcttgtgttggtggcactagtgttcgtgaggatcagcgtattctccaaactggtgtccatgttgttgttggtactcctggacgtgtgtttgacatgctgcgaagacagtctcttcggtcagattgcattaaaatgtttgttttggatgaagctgatgaaatgctttcacgtggtttcaaggaccagatctacgacatcttccagttgctgccacccaaaattcaggttggagtgttctctgctacaatgcctccagaggctctggagatcacaaggaagttcatgaataagccagtgagaattctggtaaagcgtgatgaattgacccttgagggtatcaagcagttctacgtgaatgttgacaaggaagagtggaaactagagacattgtgtgacctttacgagactctggctatcactcagagtgtcatttttgtgaacacaaggcgcaaggtggactggctcactgacaagatgcgaggcagagaccatactgtctcagccacccatggagacatggaccaaaacactcgtgatatcatcatgcgtgaattccgctctggctcttctcgagttctcattaccactgaccttttggcccgtggtattgatgttcagcaagtgtctctggtcataaattatgatttgcctacccaacctgaaaactatctccatcgtattgggcgaagtgggcgttttggaagaaaaggtgttgctatcaactttgtcacattggaagatgcaagaatgctggctgatattcagaagttctataatgtgatcgtagaggaattgccttcaaatgttgccgatctactctga

SEQ ID NO: 381 - protein, 413 aa, Medicago truncatula
MAGLAPEGSQFDTKQFDTKMNELLSTEGQEFFTSYDEVHETFDAMGLLENLLRGIYAYGFEKPSAIQQRGIVPFIKGLDVIQQAQSGTGKTATFCSGILQQLDYGLVQCQALVLAPTRELAQQIEKVMRALGDYLGVKVHACVGGTSVREDQRILQTGVHVVVGTPGRVFDMLRRQSLRSDCIKMFVLDEADEMLSRGFKDQIYDIFQLLPPKIQVGVFSATMPPEALEITRKFMNKPVRILVKRDELTLEGIKQFYVNVDKEEWKLETLCDLYETLAITQSVIFVNTRRKVDWLTDKMRGRDHTVSATHGDMDQNTRDIIMREFRSGSSRVLITTDLLARGIDVQQVSLVINYDLPTQPENYLHRIGRSGRFGRKGVAINFVTLEDARMLADIQKFYNVIVEELPSNVADLL

SEQ ID NO: 382 - DNA, 1761 bp, Medicago truncatula
ctcactcgctttttcacaacgcaaaaacaaaaacgctctttgctctctctctttcctcaactccgcggcttagatctgaggagttttggaaaccctaataaccgttctcttcaacaacatcgttttatctctcaccgatcatcaactttttcatcatctcttaagtcatggcaggcgttgcaccagagggttcacagtttgatgctaagcagtttgattcaaaaatgaacgagttgctcacaaccgatgcacaggacttcttcacatcttatgatgaggtctatgatagttttgatgctatgggcttgcaagagaatcttctcagaggcatttacgcatatggttttgagaagccatcagctattcagcaacggggaatagttccatttatcaagggtcttgatgttatacaacaggctcagtctggaacagggaagactgcaaccttctgctctgggattttgcagcaacttgactacagtgtgacagaatgtcaagccttggtcttagcgcctactcgtgagcttgctcagcagattgagaaggtcatgcgcgctcttggagattatctaggtgttaaggtgcatgcttgtgtcggaggaaccagtgttcgtgaagatcagcgcattctatcaagcggtgttcatgttgttgttggtacccctggacgtgtatttgacatgctgcggagacagtcacttcggccagattacatcaaaatgtttgtactggatgaggctgatgagatgctttctcgtggttttaaagatcagatctatgatatattccagctgttgccatctaagattcaagtcggagttttctctgctacaatgcctcctgaggcacttgagatcacaaggaagttcatgaacaaacctgtgaggattcttgtgaagcgtgatgagctcaccttggagggtatcaagcagttctatgtcaatgttgataaggaggaatggaagcttgacacactctgtgatctttacgagactttggctatcactcagagtgtcatatttgtgaacaccagacgaaaggttgactggctgacagacaagatgagaagccgtgaccacacagtctcggcaactcacggagatatggaccagaacactagggacattatcatgcgtgaattccgttctggatcttcccgtgttttaataactactgatcttcttgctcgtggtattgatgttcagcaagtgtctttagttataaattatgatctcccaacacagcctgagaactatctgcatcgtattggtcgtagtggaaggtttggaaggaaaggtgttgctattaactttgtcacaactgatgacgaaagaatgctgagtgacatccagaagttctacaatgtgttgattgaggagctgccttccaatgttgctgaacttctgtgatgaaattttttcttccatcattacttagagggaagttggtttctgaggtaagtggtatgtaatgtttctcccctttttgccccatttgttgtatttctgttttaaaaccttgtttggcctttttaataggtgtagtaatttattttacattttccgtctgaacatcctaagtgataagtacttgcaatgtggaatgcattattgtctggaatggcttgttgattgttgttgcacctttttaacaagcaagtttttgaatttatcttgagttctaatatatatgctgaagtagtttgattgtatcgctggcacccccattttggtgactctattcggtcaaaggttacataag

SEQ ID NO: 383 - protein, 413 aa, Medicago truncatula
MAGVAPEGSQFDAKQFDSKMNELLTTDAQDFFTSYDEVYDSFDAMGLQENLLRGIYAYGFEKPSAIQQRGIVPFIKGLDVIQQAQSGTGKTATFCSGILQQLDYSVTECQALVLAPTRELAQQIEKVMRALGDYLGVKVHACVGGTSVREDQRILSSGVHVVVGTPGRVFDMLRRQSLRPDYIKMFVLDEADEMLSRGFKDQIYDIFQLLPSKIQVGVFSATMPPEALEITRKFMNKPVRILVKRDELTLEGIKQFYVNVDKEEWKLDTLCDLYETLAITQSVIFVNTRRKVDWLTDKMRSRDHTVSATHGDMDQNTRDIIMREFRSGSSRVLITTDLLARGIDVQQVSLVINYDLPTQPENYLHRIGRSGRFGRKGVAINFVTTDDERMLSDIQKFYNVLIEELPSNVAELL

SEQ ID NO: 384 - DNA, 1631 bp, Micromonas
ctcgtgccgaattcggcacgaggtcgcccccgtgcgtcttggaacccgctcacaccgctcaataccccgcaacccctaagggcccaccaaaaggtgcctttagttcaagctctttatacactccctctaagttccaacgaacatgtccggcgaaggtggtttcaacgatgacgcgtacgacgctggcatgcaggccattctcggcgaggacaaggacgagggcggcgagatgaccatcacggactggaccgaggttcacgagagcttcgacgccatgaaccttcacgagaaccttctgcgcggcatttacgcgtacggtttcgaaaagccgagcgcgattcaacaaaggggtatcgtgcctttcaccaaaggcctggatgtgatccagcaagcgcagtccggtaccggtaaaaccgccactttctgcgccggcgtgctgcagcagctggattacgaaaaggaggagtgccaagccctggtgctggcgccgacgcgcgagctcgcgcagcaaatcgaaaaggtcatgcgcgccttgggggactacctcaacgtcaagtgccacgcctgcgtgggtggtacctcggttcgcgaagatcagcggattctgcaagccggcgtgcacgtcgtggtcggcacgcccggtcgcgtgtacgacatgcttcgccgcagggcgctgaagccggattacatcaagatcttctcccttgacgaggcggatgagatgctttcccgaggtttcaaggaccagatctacgacatcttccagctccttccctcaaagctgcaggtaggtgttttctccgccaccatgccccccgaagccctagagatcacgcgcaagttcatgaccaagccggtgcgcattctcgtcaagcgcgacgaactcaccctggaaggtatcaagcagttctacgtcaacgtggacaaggaggagtggaagctcgataccctttgcgatttgtacgaaaccctcgccatcacgcagtctgtgattttcgccaacaccaggcgcaaggtcgactggctgacggataagatgcgcgcgcgcgacttcaccgtctccgccacgcacggtgacatggaccaaaacacgcgtgacatcatcatgcgcgagttccgcagtggctcctcccgcgtcctcatcaccaccgatctcctcgcccgcgggatcgacgtccagcaagtgtccctggtcatcaactttgacctgcccacgcagcccgagaactacctgcaccgcatcggtcgttccggtcgtttcggtcgcaagggtgtcgccatcaacttcgtcacgaaggatgatgagcgccttctccaggacgtgcagcgtttctaccagaccgtcatcgaggagcttccctccaacgtcgccgacctcatctaagacttttgattgctccagcagttgtgccagagcgtgccgattgatgcaatttattcgtcaccgatgataccaacaaagcgacaaaccacctttttcgtgcgtgaaacgcggggttgtccccggctttcgcgaacgcatctcccttagggacccagaccattagtgcgtctcagcaaggctgccgagacagatacacgagttgcttttttattaaaaacagcttactctttaaaaaaacctcgtgccg

SEQ ID NO: 385 - protein, 413 aa, Micromonas
MSGEGGFNDDAYDAGMQAILGEDKDEGGEMTITDWTEVHESFDAMNLHENLLRGIYAYGFEKPSAIQQRGIVPFTKGLDVIQQAQSGTGKTATFCAGVLQQLDYEKEECQALVLAPTRELAQQIEKVMRALGDYLNVKCHACVGGTSVREDQRILQAGVHVVVGTPGRVYDMLRRRALKPDYIKIFSLDEADEMLSRGFKDQIYDIFQLLPSKLQVGVFSATMPPEALEITRKFMTKPVRILVKRDELTLEGIKQFYVNVDKEEWKLDTLCDLYETLAITQSVIFANTRRKVDWLTDKMRARDFTVSATHGDMDQNTRDIIMREFRSGSSRVLITTDLLARGIDVQQVSLVINFDLPTQPENYLHRIGRSGRFGRKGVAINFVTKDDERLLQDVQRFYQTVIEELPSNVADLI

SEQ ID NO: 386 - DNA, 1506 bp, Nicotiana benthamiana
gcacgagggtagatccgagaagtttgggaaaaaaaccctaacttctcttattactcacaaccgcagcatctcttctcttcctctacatcttcagtcatggcaggtgcagctcctgaaggatcacagtttgatgctcgtcagtatgattcgaaaatgacagaattgctaaatgctgaagggcaagatttctttacctcatacgatgaggtctatgatagttttgatgccatgggattgaaggagaacctcctcaggggcatttacgcatacggttttgagaaaccctcagcaattcaacaaagaggaattgtacctttctgcaaaggtcttgacgtgattcaacaggctcaatctggaactggaaagactgctactttttgctctggaattctgcaacaactagactatgaactactagactgtcaagctttggtcttggcacctactcgtgagcttgcacagcaaattgaaaaggtcatgcgagcacttggagactatcttggtgtcaaggttcatgcttgtgtgggaggcaccagtgtccgtgaggatcaacgcatcctttcaagtggggttcacgttgttgtgggaacccctggacgtgtatttgacatgctaaggagacagtctctccgccctgaccacattaagatgtttgtattagacgaggctgatgaaatgctttccagaggcttcaaggatcagatctacgatattttccagctcttgcctcctaagattcaggttggtgttttctctgctacaatgcctcctgaggcccttgagatcacaaggaagttcatgaacaaacccgtgaggattcttgtgaaacgtgatgaactgaccttagaaggtattaaacagttttatgtgaatgtggacaaggaagaatggaagcttgagaccctttgcgatttgtatgaaaccttggccatcacacagagtgtgatatttgtgaatactcgtcgcaaagttgattggttgactgacaagatgcgaagcagagatcatacagtttcggccactcatggtgacatggatcagaatactagggatattataatgcgcgaatttcgttctggttcctctcgtgttctcatcaccactgatcttttggccagaggaattgatgtccaacaagtttcccttgtcataaattatgatctccccactcaacctgagaattaccttcatcgtattggacgtagtgggaggtttggtaggaagggtgtttcgatcaacttcgtaaccaacgacgatgagagaatgctgtctgacattcagaggttttacaatgtggtgattgaggagctcccagcaaatgttgctgatctcctgtaaccagctttggacattcagaggttttacaatgtggtgcttttgctgtgtctcgaaacttcccctcctttctttttcatcttcttgatatccttcttaccttttgtttgtttaatagtttctgtgattctgaactaatgagtaatgcatattagcattttgtaatccatc

SEQ ID NO: 387 - protein, 413 aa, Nicotiana benthamiana
MAGAAPEGSQFDARQYDSKMTELLNAEGQDFFTSYDEVYDSFDAMGLKENLLRGIYAYGFEKPSAIQQRGIVPFCKGLDVIQQAQSGTGKTATFCSGILQQLDYELLDCQALVLAPTRELAQQIEKVMRALGDYLGVKVHACVGGTSVREDQRILSSGVHVVVGTPGRVFDMLRRQSLRPDHIKMFVLDEADEMLSRGFKDQIYDIFQLLPPKIQVGVFSATMPPEALEITRKFMNKPVRILVKRDELTLEGIKQFYVNVDKEEWKLETLCDLYETLAITQSVIFVNTRRKVDWLTDKMRSRDHTVSATHGDMDQNTRDIIMREFRSGSSRVLITTDLLARGIDVQQVSLVINYDLPTQPENYLHRIGRSGRFGRKGVSINFVTNDDERMLSDIQRFYNVVIEELPANVADLL

SEQ ID NO: 388 - DNA, 1630 bp, Nicotiana tabacum
cattattgtatcgtatatctctacaaactccagggagccgtagatccgagaagtttgggaaaaaaaccctaacttctcttattactcacaactgcagcatctcttctctccctctacatcttcagtcatggcgggtgcagctcctgaaggatcacagtttgatgctcgtcagtatgattcgaaaatgacagagttgctaaatgctgaagggcaagatttctttacctcatacgatgaggtctatgatagttttgatgccatgggattgaaggagaacctcctcaggggcatttatgcatacggttttgagaaaccctcagcaattcaacaaagaggaattgtacctttctgcaaaggtcttgatgtgattcaacaggctcagtctggaactggaaagactgctactttttgctctggaattctgcaacaactagactatgaactactagactgtcaagctttggtcttggcacctactcgtgagcttgcacagcaaattgaaaaggtcatgcgagcacttggagactatcttggtgtcaaggttcatgcttgtgtgggaggcaccagtgtccgtgaggatcaacgcatcctttcaagtggggttcacgttgttgtgggaacccctggacgtgtatttgacatgctaaggagacagtctctccgccctgatcacattaagatgtttgtattggacgaggctgatgaaatgctttccagaggcttcaaggatcagatctacgatattttccagctcttgcctcctaagattcaggttggtgttttctctgccacaatgcctcctgaggcccttgagatcacaaggaagttcatgaacaaacccgtgaggattcttgtgaaacgtgatgaactgaccttagaaggtattaagcagttttatgtgaatgtggacaaggaagaatggaagcttgagaccctttgcgatttgtatgaaaccttggccatcacacagagtgtgatatttgtgaatactcgtcgcaaagttgattggttgactgacaagatgcgaagcagagatcatacagtctcggccactcatggtgacatggatcagaatactagggatattataatgcgcgaatttcgttctggttcctctcgtgttctcatcaccaccgatcttttggccagaggaattgatgtccaacaagtttcccttgtcataaattatgatctccccactcaacctgagaattaccttcatcgtattggacgtagtgggaggtttggtaggaagggtgtttcaatcaacttcgtaaccagcgacgatgagagaatgctgtctgacattcagaggttttacaatgtggtgattgaggagctcccagcaaatgttgctgatctcctgtaaccagctttggacattcagaggttttacaatgtggtgctttagctgtgtcgcgaaacttcccctcctttctttttcatcttcttgatatccttcttaccttttgtttgtttagtagtttctgtgattctgaactaatgagtaatgcatattagcattttgtaatccatcatcctatttagtggtgggcttttgctagtttttgacatccaaagtttttgtatttgaagaatgatatcgagtacatttttaatttgcattttg

SEQ ID NO: 389 - protein, 413 aa, Nicotiana tabacum
MAGAAPEGSQFDARQYDSKMTELLNAEGQDFFTSYDEVYDSFDAMGLKENLLRGIYAYGFEKPSAIQQRGIVPFCKGLDVIQQAQSGTGKTATFCSGILQQLDYELLDCQALVLAPTRELAQQIEKVMRALGDYLGVKVHACVGGTSVREDQRILSSGVHVVVGTPGRVFDMLRRQSLRPDHIKMFVLDEADEMLSRGFKDQIYDIFQLLPPKIQVGVFSATMPPEALEITRKFMNKPVRILVKRDELTLEGIKQFYVNVDKEEWKLETLCDLYETLAITQSVIFVNTRRKVDWLTDKMRSRDHTVSATHGDMDQNTRDIIMREFRSGSSRVLITTDLLARGIDVQQVSLVINYDLPTQPENYLHRIGRSGRFGRKGVSINFVTSDDERMLSDIQRFYNVVIEELPANVADLL

SEQ ID NO: 390 - DNA, 1681 bp, Nicotiana tabacum
ggccattacggccgggggaggagtttttggaaaaaaagaagcagcagtctttgaaaaaccctaatcctcaataatccctctcaaatcttcagatcttcctttaacacacttcatatctttatcagttatggcaggcttggcaccagagggttctcaatttgatgctcgtcagtatgacgccaaaatgacagagctgcttggtactgaacagcaagaattcttcacatcatacgatgaggtttacgaaagttttgatgccatgggtttgcaagaaaaccttctgaggggcatttatgcctatggttttgagaagccatctgctattcagcaaaggggcattgttcccttttgcaagggccttgacgttatccagcaggcacaatctggaactggaaagacggcaactttctgctctggaattctccagcagcttgattatagtttagttgaatgtcaggctctggttcttgcaccaacccgtgagctagctcaacagattgagaaggttatgcgggcacttggtgactatctgggtgtgaaggttcatgcttgtgttgggggtaccagtgtccgtgaggatcagcgtatccttcagagcggtgttcatgtcgtggttggtactccaggccgtgtctttgacatgctgcgcaggcagtctcttcgccctgacaacatcaagatgtttgttttggatgaagccgatgaaatgctctctagaggtttcaaggatcagatttatgatatattccaacttttgccaccaaaaatccaagtgggtgttttctctgccactatgccaccagaggccctggagattactagaaagttcatgaacaagcccgttaggattcttgtgaagcgtgatgagctcactcttgaaggtattaagcaattttatgtcaatgttgacaaggaagagtggaagcttgaaacactctgtgatctttacgagaccttggccatcacccagagtgtcatctttgttaacactaggcgaaaggttgattggctcactgataaaatgcgtggccgtgatcatacagtatctgcaactcatggagacatggatcagaacacaagagatatcattatgagggagttccgatctggctcatctcgtgtgcttatcactactgatctccttgctcgtggtattgatgtccagcaagtctcccttgttattaattacgatctgccgactcaaccagaaaactacctgcatcgtattggtcgtagtggccgatttggaaggaagggtgtttctatcaactttgtcaccaaggatgatgaaaggatgctttttgacatacaaaagttttataatgtcgtgattgaggagctgccagctaatgttgctgatctcctttgatgcgattttggttatggtgcggggaatttttccttacatgaagtagtttaatatatttattcttaggcttagtttcactttgcgctggacttggaattgggaaatgctggatccttgattttgccaaagcaccagctgctgtcccaatttagtagaactttgagtcgactattgcaaattttgtttggttttgtcagtttgtatgtttaagcgtctaatgacttaaaattttgttgctgtctgaattgactatattgagtttagcagagctatttttctctggaaggaaagctttttgctggtgaaaaaaaa

SEQ ID NO: 391 - protein, 413 aa, Nicotiana tabacum
MAGLAPEGSQFDARQYDAKMTELLGTEQQEFFTSYDEVYESFDAMGLQENLLRGIYAYGFEKPSAIQQRGIVPFCKGLDVIQQAQSGTGKTATFCSGILQQLDYSLVECQALVLAPTRELAQQIEKVMRALGDYLGVKVHACVGGTSVREDQRILQSGVHVVVGTPGRVFDMLRRQSLRPDNIKMFVLDEADEMLSRGFKDQIYDIFQLLPPKIQVGVFSATMPPEALEITRKFMNKPVRILVKRDELTLEGIKQFYVNVDKEEWKLETLCDLYETLAITQSVIFVNTRRKVDWLTDKMRGRDHTVSATHGDMDQNTRDIIMREFRSGSSRVLITTDLLARGIDVQQVSLVINYDLPTQPENYLHRIGRSGRFGRKGVSINFVTKDDERMLFDIQKFYNVVIEELPANVADLL

SEQ ID NO: 392 - DNA, 1497 bp, Nicotiana tabacum
gtttaattctcagttttgctaaagttattatcatcgtcattccgagtcatggcacgtttggcaccagatggagctcaatttgatgcccgtcaatatgattctaagatgaacgatttacttgccgctgatggaaaagatttctttacatcatatgacgaagtttatgacagttttgatgctatgggtctgcaagagaaccttctcaggggcatttatgcctatggttttgagaaaccttctgcaattcaacaaagaggtatagttccattttgcaagggacttgatgtaattcagcaggctcagtctggcacaggaaaaacagctactttttgttctggaattttgcagcagcttgattatggtttagttcaatgtcaagcgttggtgttagcacctactcgtgaacttgctcaacagattgagaaggtgatgcgagcacttggtgactaccttggggttaaggtccatgcttgtgtaggtgggactagtgtcagggaggatcaacgtattctcgcagctggtgttcatgttattgttggcacccctggacgtgtgtttgacatgctgcgaagacagtctctccgtcctgattacctcagaatgtttgtgctagacgaggctgatgaaatgctgtcacgtggttttaaggatcagatatatgatatttttcagatgctgcctacaaaagtccaagtcggagtgttttctgcgaccatgccaccagaagcccttgacatcacaagaaagttcatgaataagcccgtgagaatcttggttaaacgcgatgaattgacacttgagggtatcaaacagttttatgtcaatgttgataaggaggaatggaagctcgagacactctgcgatctatacgagacgctagcaattacacagagtgtcatatttgtgaacaccaggcgcaaggttgattggttaacagacaaaatgcgaacgcgtgatcacacagtctcagctacacatggagatatggaccagaacactagggacataatcatgcgcgagtttcgctctggttcttctcgtgtccttatcacaaccgatctgttggctcgtggtatagatgtacaacaagtatcacttgtgatcaactatgatctcccgactcagccagagaattatctccatcgtattggaagaagtggaaggtttggaaggaaaggagttgctatcaactttgtgacaacagacgacgaaagaatgttgttcgatattcagaagttttacaacgtgataatcgaagaactcccctcaaatgttgctgatctcctctgaaaaacttatgtttgtggctggagctttaagcagaaagagtaaccatgttatagtgtccacaccattccatagaaattagtcttttaactaccattatcatctagtgtctaagacagacctgaggcagtaatgctgctccaaattttgcagtagcacattttgtttttcatttcctaattcttaaacttctttggcattttgtagttt

SEQ ID NO: 393 - protein, 413 aa, Nicotiana tabacum
MARLAPDGAQFDARQYDSKMNDLLAADGKDFFTSYDEVYDSFDAMGLQENLLRGIYAYGFEKPSAIQQRGIVPFCKGLDVIQQAQSGTGKTATFCSGILQQLDYGLVQCQALVLAPTRELAQQIEKVMRALGDYLGVKVHACVGGTSVREDQRILAAGVHVIVGTPGRVFDMLRRQSLRPDYLRMFVLDEADEMLSRGFKDQIYDIFQMLPTKVQVGVFSATMPPEALDITRKFMNKPVRILVKRDELTLEGIKQFYVNVDKEEWKLETLCDLYETLAITQSVIFVNTRRKVDWLTDKMRTRDHTVSATHGDMDQNTRDIIMREFRSGSSRVLITTDLLARGIDVQQVSLVINYDLPTQPENYLHRIGRSGRFGRKGVAINFVTTDDERMLFDIQKFYNVIIEELPSNVADLL

SEQ ID NO: 394 - DNA, 1880 bp, Ostreococcus lucimarinus
cgcgtttgaaacgcacgaccgcaccctaacgcacccacaaaaggttcgtcgatttcgatcgcgcgcggacgcgcgcgcgcgcgaccgcgaccgcgtcgcgcgacgcgcgaagacgcgagaagatgcgcgcgaatccgcgcatcgcatcgcgatgcggcggcgcgtcgcgaatgcgcgcgatcgcgcgcgcgcgatcggacgttcgcgcgcgctcgcgcggcgaacgatcgggagtggatttcgcgatcgtcgcgcggcgtcgacggcggcgaggcgcgatcggtgacggcgtcgacggggcgaatgcgatggcggcgatggcgccgccgcgggatggattccatcggagtcaatcttagcgatcgaggtctcggacgcggggcgtcgaacgacggctgggggggggggatgaagacgcggtgaatgaagactgacggtgtccgtgacgtactcgatcgacagcacacgaaagaaacgcataaatcatgtctggagaaggcggattcgacgacgcgaactacgatcgcggcatggaggaactcctcaaggatgaccaggatgagaacggagagggtggcatcacggagtggaccgaggtgcacgaaacgttcgatacgatgaacttgcaagagaacttgttgcgcgggatctacgcgtatggtttcgaaaagccgtctgctattcagcaacggggcatcgtgccgttttcgaagggcttcgacgtcattcagcaagcgcaatccggtacgggtaagacggcgactttctgcgctggtatcttgcaaagcttggattactccgttcacgagtgccaagcgctcgttttggcgccgacccgcgagttggcgcagcagattgaaaaggttatgcgcgccttgggcgactaccttcaagtcaagtgccacgcgtgcgtcggtggtacctccgtccgcgaagacacccgcatccttcaagccggtgtgcacgtcatcgtcggtaccccgggtcgggtgtacgatatgcttcgtcgacgcgcgttgaagagcgattctatcaagattttcgctctcgatgaagccgatgaaatgctttcccgcggtttcaaggatcaaatttacgacattttcaccttgctcccgccgaaggtgcaagttggtgttttctccgcgacgctcccgccggaagcgctcgagatcacgcgcaagttcatgaccaagccggtgcgcattttggtcaagcgtgatgagctcacccttgaaggtatcaagcagttctacgtcaacgtcgacaaggaacaatggaagttggacacgttgtgcgacttgtacgagacgctcgcgattacgcagtccgtcatcttcgccaacacccgccgcaaggtcgactggctcacggataacatgcgagcccgcgatttcaccgtctccgccacgcacggtgacatggaccaaaacactcgtgacgtcattatgcgcgagttccgctctggttcttcccgcgtgttgatcaccaccgatttactcgcccgtggtatcgacgtccagcaagtttccttggtcatcaactatgacttgcccacgcaacccgaaaactaccttcaccgtatcggtcgttccggtcgtttcggtcgtaagggtgtttccatcaactttgttaccgccgaagacgaacgtctcctccaagacatccaacgtttctaccaaacggtcatcgaggaacttccctccaacgtcgccgatctcatctaaggtgcaagcctccatagtagagatgaagcttcgcgacagagcggccagttccgctgtcctactgcacgtgcattaaatccaaactcgtgcgctctcgcttttcagagccatccattagcccggttcgcgcacaaagtgaaatatcgagtgtta

SEQ ID NO: 395 - protein, 413 aa, Ostreococcus lucimarinus
MSGEGGFDDANYDRGMEELLKDDQDENGEGGITEWTEVHETFDTMNLQENLLRGIYAYGFEKPSAIQQRGIVPFSKGFDVIQQAQSGTGKTATFCAGILQSLDYSVHECQALVLAPTRELAQQIEKVMRALGDYLQVKCHACVGGTSVREDTRILQAGVHVIVGTPGRVYDMLRRRALKSDSIKIFALDEADEMLSRGFKDQIYDIFTLLPPKVQVGVFSATLPPEALEITRKFMTKPVRILVKRDELTLEGIKQFYVNVDKEQWKLDTLCDLYETLAITQSVIFANTRRKVDWLTDNMRARDFTVSATHGDMDQNTRDVIMREFRSGSSRVLITTDLLARGIDVQQVSLVINYDLPTQPENYLHRIGRSGRFGRKGVSINFVTAEDERLLQDIQRFYQTVIEELPSNVADLI

SEQ ID NO: 396 - DNA, 1279 bp, Ostreococcus taurii
cgcacgcccaaacaacgcttaaaaaagaaacttcaacatgtctggtgaaggaggattcgacgacaccaactacgaccgcggcatggaggaactcctccgcgaagagaaggatgaagacggaaacgcgatcatcacggaatggacggaagtccacgagacgttcgacacgatgaacctccaagagaacttgctccgcgggatctacgcgtatggttttgaaaagccgtccgccattcagcaacgtggtattgtgccgttctccaagggtcttgacgtgatccagcaggcgcaatccggtaccggtaagacggccactttctgcgccggtatcctccaatccttggactactccgtcaccgagtgccaagcgctcgtcttggcgccgacgcgggagttggcccagcaaatcgagaaggtcatgcgcgccctcggcgactaccttcaagtgaagtgccacgcgtgcgtcggcggtacgtccgttcgtgaagatacccgcatcctccaagctggtgtccacgtcatcgtcggtaccccgggtcgagtttacgacatgcttcgtcgtcgcgctttgaagagcgaccacatcaagatctttgctcttgacgaagccgatgaaatgctttcccgaggtttcaaggatcaaatctacgacatcttcaccttgctcccgccgaaggttcaagttggtgttttctccgcgacgcttccgccggaggcgctcgagatcacgcgcaagttcatgaccaagccggtgcgcattttggtcaagcgtgacgaactcacccttgaaggtattaagcagttctacgtcaacgtcgaccaggaacaatggaagctggacacgctctgcgatctgtacgaaacgctcgccattacgcagtccgttatcttcgcgaacactcgtcgtaaggttgactggctcacggacaacatgcgtgcccgcgatttcaccgtctccgccacgcacggtgatatggatcaaaacacccgtgacgtcatcatgcgcgagttccgctccggctcgtcccgtgtgttgatcaccactgacttgcttgctcgtggtatcgacgtccaacaagtttcgttggtgatcaactttgacttgcccacgcagcccgaaaactaccttcaccgtatcggtcgttccggccgtttcggtcgtaagggtgtcgccatcaactttgttacctccgacgacgaacgcctcctccaggacatccaacgtttctaccaaacggtcatcgaggaacttccctccaacgtcgctgatctcatctaa

SEQ ID NO: 397 - protein, 413 aa, Ostreococcus taurii
MSGEGGFDDTNYDRGMEELLREEKDEDGNAIITEWTEVHETFDTMNLQENLLRGIYAYGFEKPSAIQQRGIVPFSKGLDVIQQAQSGTGKTATFCAGILQSLDYSVTECQALVLAPTRELAQQIEKVMRALGDYLQVKCHACVGGTSVREDTRILQAGVHVIVGTPGRVYDMLRRRALKSDHIKIFALDEADEMLSRGFKDQIYDIFTLLPPKVQVGVFSATLPPEALEITRKFMTKPVRILVKRDELTLEGIKQFYVNVDQEQWKLDTLCDLYETLAITQSVIFANTRRKVDWLTDNMRARDFTVSATHGDMDQNTRDVIMREFRSGSSRVLITTDLLARGIDVQQVSLVINFDLPTQPENYLHRIGRSGRFGRKGVAINFVTSDDERLLQDIQRFYQTVIEELPSNVADLI

SEQ ID NO: 398 - DNA, 1561 bp, Picea abies
ggcgcaggcgatctcacaggcctgtaatatcttcagctattttaatcacgggaatcttctcttcggcgtcttttttaagatcgaggttttctcagtgcgaaaataagatagaacttgaaaatggcgggtgtggatccggccggaaataacttcgacgccaagagctatgacaaaaacatgcagagtgtccttggaggagaagaactttattccacctgggaggaagttaatgaaacctttgactccatggggcttcaggaaaaccttctaagaggaatttatgcatatggttttgagaagccatctgctatccaacagagagggattgttcctttctgccaaggtcttgatgttatccagcaagcacaatcaggaacaggaaagacagcaactttctgttcaggaattctacaacagttggactacaatgttcctgagtgccaggcactagttttggccccaactcgagaactagcccagcagatagagaaagttatgagggcacttggtgattacctacaagtaagggtacatgcatgtgttggtgggacaagcattcgagaggatctccgtattctccaagctggtgttcatgttgttgtggggacaccaggtagggtctatgacatgctgcggcgtcgtgccttgcgtcctgattcaatcaaaatgtttgtgctcgatgaagcagatgaaatgctatcacgtggatttaaggaccagatatatgatatctttcaattgctaccttcaaatctccaagttggtgttttctcggccaccatgcctcctgaagcattggagattacaaggaagttcatgaataatccagtaaggattcttgtaaaaagagatgagcttaccctggagggtatcaaacagttctacgtcaatgtagagcgagaggattggaagcttgatacactatgtgacctgtatgaaactttggcaatcacacagagtgtgattttcatcaataccaggagaaaggtagatatgctcacagatcaaatgcgggctcgagatcatacagtgtctgcaacccatggtgacatggatcaaaacacaagagacatcatcatgagggaatttaggtctggatcttctcgagtgttgatcactactgacctattggcccgaggtattgatgtacaacaagtgtctcttgttatcaactatgacttgccaacacagcctgaaaactacctccatcgtattggtcgtagtggacgattcggtagaaagggtgtggccatcaactttattaccaaggacgatgagagaatgctgcaggacatccagagattctataatgtggtagttgaagaattgccaaataatgttgctgatttaatataaatatatcacagaagcagcccatatgtacgatgcagtgtgcagtgagttgagtacgctttatcttttgggttgaaaactcttcctcccacttgattctgaaaatcgttaacaactgttttgtgtggagtaatgtattacttggacctttagtaactgtattgctttgttgtaatctcacatgagagggagccattttaagcttttt

SEQ ID NO: 399 - protein, 411 aa, Picea abies
MAGVDPAGNNFDAKSYDKNMQSVLGGEELYSTWEEVNETFDSMGLQENLLRGIYAYGFEKPSAIQQRGIVPFCQGLDVIQQAQSGTGKTATFCSGILQQLDYNVPECQALVLAPTRELAQQIEKVMRALGDYLQVRVHACVGGTSIREDLRILQAGVHVVVGTPGRVYDMLRRRALRPDSIKMFVLDEADEMLSRGFKDQIYDIFQLLPSNLQVGVFSATMPPEALEITRKFMNNPVRILVKRDELTLEGIKQFYVNVEREDWKLDTLCDLYETLAITQSVIFINTRRKVDMLTDQMRARDHTVSATHGDMDQNTRDIIMREFRSGSSRVLITTDLLARGIDVQQVSLVINYDLPTQPENYLHRIGRSGRFGRKGVAINFITKDDERMLQDIQRFYNVVVEELPNNVADLI

SEQ ID NO: 400 - DNA, 1416 bp, Populus deltoides
gtaccggaatatgcccgggaattcggccattacggccggcgttccgaggagtttgggctattattgatttctctattctatcttcagcttcctttcaatctctctcctgttctttcttgctatcaatcaatcactccctcactcccagtcatggcgggtttggcaccagaagggtcacaattcgattctaggcaatatgatgctagaatgaatgatttgctcgcaaatgatggacaagatttcttcacatcatatgatgaggtttatgacacttttgattcaatgggactgcaagagaaccttttgaggggcatctatgcctatggttttgagaagccatctgcaatccagcaaagaggaattgttccattctgcaagggccttgatgtgattcagcaggctcagtcaggaactggaaaaacagcaaccttctgctctggtattctccagcaacttgattatggtctagtgcaatgtcaagcgttggtccttgcgcccactagggaacttgcacaacagattgaaaaggttatgcgggcacttggtgattatcttggcgtcaaagttcatgcttgtgttggtggcacaagtgttcgtgaggaccaacgcattcttcaagctggagttcatgttgttgttggcactcctggtcgtgtgtttgatatgttaagaaggcagtcacttcgtccagattacattaaaatgtttgtcttggatgaggctgatgaaatgttgtcccgtggttttaaggatcagatctacgatattttccagttgctgccatctaaagttcaagttggcgtgttctctgctactatgccacctgaagctcttgagatcacaaggaagttcatgaacaagcctgtgaggatcttggttaagcgtgatgagcttacccttgaaggtatcaaacagtttcatgtcaatgttgataaggaggagtggaagcttgaaactctctgtgatctatacgagaccctagccatcactcagagtgttatttttgttaacacccgccgcaaggttgactggctgacagacaagatgcgaagccgtgaccacacagtctcagctactcatggagatatggaccagaacactcgtgatatcattatgcgagaattccggtctggctcttctcgagttctcatcacaactgatctcctggcccgtggtattgatgtgcagcaagtgtcccttgtcataaattatgatctgccgactcaaccagaaaactaccttcaccgtattggacgaagtgggcgttttggaagaaagggtgtcgctattaactttgtgacaagggatgatgagagaatgctgtttgatatccagaagttctataatgtggtcatcgaggagctgccatctaacgtggctgatctcctgtgatgagatatttggtgaaaaaggggg

SEQ ID NO: 401 - protein, 413 aa, Populus deltoides
MAGLAPEGSQFDSRQYDARMNDLLANDGQDFFTSYDEVYDTFDSMGLQENLLRGIYAYGFEKPSAIQQRGIVPFCKGLDVIQQAQSGTGKTATFCSGILQQLDYGLVQCQALVLAPTRELAQQIEKVMRALGDYLGVKVHACVGGTSVREDQRILQAGVHVVVGTPGRVFDMLRRQSLRPDYIKMFVLDEADEMLSRGFKDQIYDIFQLLPSKVQVGVFSATMPPEALEITRKFMNKPVRILVKRDELTLEGIKQFHVNVDKEEWKLETLCDLYETLAITQSVIFVNTRRKVDWLTDKMRSRDHTVSATHGDMDQNTRDIIMREFRSGSSRVLITTDLLARGIDVQQVSLVINYDLPTQPENYLHRIGRSGRFGRKGVAINFVTRDDERMLFDIQKFYNVVIEELPSNVADLL

SEQ ID NO: 402 - DNA, 1320 bp, Picea engelmannii x glauca
gctatcaactgcaatcatggcagaaacattcaacgatgctccagaagcacttatcgagtccaactgggacgaggttgtcgattctttcgatgacatgagcttggacagcaagctcctccgtggaatttacgcatatggtttcgaacgaccatcggccattcaggctcgagctatcaagccagtcatcaaaggacacgatgtcatcgcacaggcccagtcaggtactggaaagacagccactttctcgatctctgttcttcagaaactcgacgtttcgctcaagcagacacaagcacttattctagcacctacccgagagctcgcacaacaaatccaaaaggtattgatcgccattggcgacttcatggacattgagtgtcatgcctgtatcggtggcacaaacgtgcgagatgatatgaaagccctccaggatggtcctcatgtcatcgtcggaacacctggtcgtgttcacgatatgattcagcgacgagctcttcgaaccgacaacgtcaagatgtttgtccttgacgaagccgatgagatgctttcccgtggattcaaggagcaaattcacgacatcttccaacttcttcccccaaccacgcaagccgttctcctctcagccacaatgccacaggaggttctcgaagttaccgagaagttcatgagagaaccaatcagaattcttgtcaagaaggatgagttgaccctcgaaggtatcaagcagttctacattgcagttgagaaggaagattggaaactcgacactctgtgtgatctttacgagactgtcacaatcactcaagccgtcatcttctgtaacacaagaagaaaggtcgactggttgactgataaactcacgtctcgagatttcacagtctccgccatgcacggagacatggaccaggctcaacgagatgtcatcatgaaggagttccgatctggttcttcccgagttctgatcactactgatcttctcgctcgaggtatcgatgtccaacaagtttcattggtcatcaactacgacttgccaccaaaccgggagaactacattcaccgaatcggacgaggaggacgtttcggtcgtaagggagtctcaatcaacttcgtcacgagcgaggatgtacgaatgatgcgagatatcgagcagttctactcgactcagatcgaggagatgccaatgaacgttgctgacctcatctaagccgtgcactcgtctttggggtcctgcctcggcagatccttctcggtgtcgtcagagaacatttcaaaagtgtcgtaacgatgtatttagctagttttgaaatagatttgagaatc

SEQ ID NO: 403 - protein, 395 aa, Picea engelmannii x glauca
MAETFNDAPEALIESNWDEVVDSFDDMSLDSKLLRGIYAYGFERPSAIQARAIKPVIKGHDVIAQAQSGTGKTATFSISVLQKLDVSLKQTQALILAPTRELAQQIQKVLIAIGDFMDIECHACIGGTNVRDDMKALQDGPHVIVGTPGRVHDMIQRRALRTDNVKMFVLDEADEMLSRGFKEQIHDIFQLLPPTTQAVLLSATMPQEVLEVTEKFMREPIRILVKKDELTLEGIKQFYIAVEKEDWKLDTLCDLYETVTITQAVIFCNTRRKVDWLTDKLTSRDFTVSAMHGDMDQAQRDVIMKEFRSGSSRVLITTDLLARGIDVQQVSLVINYDLPPNRENYIHRIGRGGRFGRKGVSINFVTSEDVRMMRDIEQFYSTQIEEMPMNVADLI

SEQ ID NO: 404 - DNA, 1860 bp, Picea glauca
cgttgctgctgctgtctgctttgctctgcgaattcgcctcccgaaccatttctgctattcgatctcagcttggtttaaattttcaatcatggccggagtggtagcagatgcaactttgttcgacgctcgtcagtatgacgccaagatgaaggaaatactttcaacagaaggagacgagctcttcgcaagctacgatgaagttcacgagagcttcgatgaaatgggcctacacgagaatcttctcagaggcatctatgcctatgggtttgagaagccgtctgcgattcagcagaggggaatagtgccgttctgcaagggtcttgatgtgatacagcaagcccagtccggaacgggcaagacagcgactttctgttccggaattctgcagcaactcgattatggcttgctggactgccaggctttggttctcgcccccacccgagagcttgcacagcaaatcgagaaggtcatgcgcgctctcggggattacttgcaagttaaagttcatgcctgcgtaggtggaaccagtgttcgtgatgatcagcgtattctcatgagtggagttcatgttgttgttggaaccccaggccgtgtgtttgacatgttgcgcaggcactctcttcgccccgattacatcaagatgtttgtgttggacgaagccgatgaaatgctttccaggggtttcaaggatcagatctatgatatttttcagctgctcccttcaaagattcaggtgggcgttttctctgctacaatgcctcctgaagctcttgagatcaccaggaaattcatgagtaagcccgtgaggattctagtgaagagggatgagttgacacttgagggtatcaagcagttctatgtgaacgttgaaaaggaggattggaaacttgatacattgtgtgatctgtatgaaacactggcaatcacacaaagtgttatttttgttaacaccaggcgaaaggttgactggctgactgacaagatgagagctcgtgaccatacagtctctgctactcatggggacatggatcaaaacaccagggatattattatgagggaatttcgatctggatcctcacgtgttctgattacaactgatctgctggcccgtggtattgatgtgcaacaagtctcactggtcatcaactatgaccttcctacccaaccagaaaactacctccatcgaattggtcgtagtggcaggtttggaaggaagggcgtggcaattaactttgttacaaaggatgatgagagaatgctacaagacattcaaaggttctacaatgtggttgtcgaggagcttccttctaatgttgctgatcttctttgaggttttgttctgcgctttgaaagaaagttctcgtgagatattcaacttatcatttttatttttattgtcagacaattctttatcttggctcaaaacaagtgacgtgttttgagtagttatcttttgggcctttaaatttgagatttcttagtattggagtaggtgtcgggtagtaaaaacttgctattcacccagatagagactcggctttttattcaagtttatgtatgttggtggtatttgacataaaaattctgatgtggtacaggcaacagtaattttttgatgtttctgagttgtctgtattgtttgatttattccattgttgaagctcttgtgtatgagatgcactccttggaaattttgtacgagttggattctttgtgctatcaattgtcacatgcaattaggcattgtgcctgttattatatgacgcaatatttttctgaatgtgccatttgtaaagtaaactgcaatttttcagcactaaatccaaatgtgttaatctatgctgcaatccgtttcaaata

SEQ ID NO: 405 - protein, 413 aa, Picea glauca
MAGVVADATLFDARQYDAKMKEILSTEGDELFASYDEVHESFDEMGLHENLLRGIYAYGFEKPSAIQQRGIVPFCKGLDVIQQAQSGTGKTATFCSGILQQLDYGLLDCQALVLAPTRELAQQIEKVMRALGDYLQVKVHACVGGTSVRDDQRILMSGVHVVVGTPGRVFDMLRRHSLRPDYIKMFVLDEADEMLSRGFKDQIYDIFQLLPSKIQVGVFSATMPPEALEITRKFMSKPVRILVKRDELTLEGIKQFYVNVEKEDWKLDTLCDLYETLAITQSVIFVNTRRKVDWLTDKMRARDHTVSATHGDMDQNTRDIIMREFRSGSSRVLITTDLLARGIDVQQVSLVINYDLPTQPENYLHRIGRSGRFGRKGVAINFVTKDDERMLQDIQRFYNVVVEELPSNVADLL

SEQ ID NO: 406 - DNA, 1868 bp, Picea glauca
taataaggcggcgcaggcgatctcacaggcctgtaatatcttcggctattttaatcacgggaatcttctcttcggcgtctcttttaagatcgaggttttctcagtgcgaaaataagatagaacttgaaaatggcgggtgtggatccggccggaaataacttcgacgccaagagctatgacaaaaacatgcagagtgtccttggaggagaagaactttattctacctgggaggaagttaatgaaacctttgactccatggggcttcaggaaaaccttctaagaggaatttatgcatatggttttgagaagccatctgctatccaacagagagggattgttcctttctgccaaggtcttgatgttatccagcaagcacaatcaggaacaggaaagacagcaactttctgttcaggaattctacaacagttggactacaatgttcctgagtgccaggcactagttttggccccaactcgagaactagcccagcagatagagaaagttatgagggcacttggtgattacctacaagtaagggtacatgcatgtgttggtgggacaagcattcgagaggatctccgtattctccaagctggtgttcatgttgttgtggggacaccaggtagagtctatgacatgctgcggcgtcgtgccttgcgtcctgattcaatcaaaatgtttgtgctcgatgaagcagatgaaatgctatcacgtggatttaaggaccagatatatgatatctttcaattgctaccttcaaatctccaagttggtgttttctcggccaccatgcctcctgaagccttggagattacaaggaagttcatgaataatccagtcaggattcttgtcaaaagagatgagcttaccctggagggtatcaaacagttctatgtcaatgtagagcgagaggattggaagcttgatacactgtgtgacctatatgaaactttggcaatcacacagagtgtgattttcattaataccaggagaaaggtagatatgctcacagatcaaatgcgggctcgagatcatacagtgtctgcaacccatggtgacatggatcaaaacacaagagacatcatcatgagggaatttaggtctggatcttctcgagtgttgatcactactgacctattggcccgaggtattgatgtacaacaagtgtctcttgttatcaactatgacttgccaacacagcctgaaaactacctccatcgtattggtcgtagtggacgattcggtagaaagggtgtggccatcaactttattaccaaggacgatgagagaatgctgcaggacatccagagattctataatgtggtagttgaagaattgccaaataatgttgctgatttaatataaatacatctcagaagcagcccatatgtacgatgcagtgtgcagtgagttgagtacgctttatcttttgggttgaaaactcttcctcccatttgattctgaaaattgttaacaactgttttgtgtggagtaatgtattacttggacctttagtaactgtattgctttgttgtaatctcacatgagagggagccattttaagctttttactcgctctctcaaggtttttataagttaatacgcataatatgagcttgagagtatgtaacctctcaaagattttataagttaatttgcataatatgaggttgagagattgtaccctcaaagtttttataactcatgtgcataatatggggttgagagagtgcagtgagtgaattttctgcactctgtcattcatattctgatcttttatcgatcggactacttagaacatgtgcctttttaaccattgtacatctatcttgtttaggcatttttgattaagcatgccttttgcagct

SEQ ID NO: 407 - protein, 411 aa, Picea glauca; identical to SEQ ID NO: 399

SEQ ID NO: 408 - DNA, 1245 bp, Pennisetum glaucum
atggcaggaatggcaccggagggttcccagttcgatgctaagcactatgattctaaaatgcaggagctgctgagcactggtgagactgaggaattcttcacctcatatgatgaggtttttgagagctttgatgacatgggccttcaagagaaccttctgagaggcatttatgcttatggttttgagaagccttcagcaattcagcagagaggaattgtgcctttctgcaagggccttgatgtcattcagcaagcccaatctggtacaggaaagacagcaactttctgttctggtatcttgcagcagctcgactatggcctggttgaatgccaggccttggtccttgctcccacccgtgagcttgcacagcagattgagaaagtcatgcgcgcacttggtgactacctgggtgtgaaagttcatgcatgtgtgggtggaacttcagtccgtgaggaccaaaggattcttgccagtggcgtgcatgttgttgttggtacacctgggcgtgtctttgacatgttgcgtaggcagtcactccgtcctgatcacatcaagatgtttgtcctggatgaagctgatgagatgctttctcgtggtttcaaggatcagatttatgacatcttccagcttctcccagcaaagattcaggttggagtcttctctgctacaatgcctccagaggctcttgagattacccgcaagttcatgaacaaacctgtgagaattcttgtgaagagagatgagctcacccttgagggtatcaagcagttctatgtgaatgtggagaaggaagactggaagctggacacactatgtgacctgtacgagacccttgccatcacccagagtgtcatcttcgtcaatacccgtcgcaaggtggactggctcactgacaagatgaggagcagggaccacactgtttctgccactcacggtgacatggaccagaacactagggacatcatcatgagggagttcaggtctggttcatcccgtgttctcatcaccaccgacctgcttgcccgtggtattgatgttcagcaggtgtccctggtcatcaactatgatctccccacccagcctgagaactaccttcatcgcattggtcgtagtggtcgtttcggtaggaagggtgttgccataaactttgtgacccgtgatgatgacaggatgcagtttgacatccagaggttctacagcgtggtgattgaggagctgccgaccaacgttgctgaccttctctga

SEQ ID NO: 409 - protein, 414 aa, Pennisetum glaucum
MAGMAPEGSQFDAKHYDSKMQELLSTGETEEFFTSYDEVFESFDDMGLQENLLRGIYAYGFEKPSAIQQRGIVPFCKGLDVIQQAQSGTGKTATFCSGILQQLDYGLVECQALVLAPTRELAQQIEKVMRALGDYLGVKVHACVGGTSVREDQRILASGVHVVVGTPGRVFDMLRRQSLRPDHIKMFVLDEADEMLSRGFKDQIYDIFQLLPAKIQVGVFSATMPPEALEITRKFMNKPVRILVKRDELTLEGIKQFYVNVEKEDWKLDTLCDLYETLAITQSVIFVNTRRKVDWLTDKMRSRDHTVSATHGDMDQNTRDIIMREFRSGSSRVLITTDLLARGIDVQQVSLVINYDLPTQPENYLHRIGRSGRFGRKGVAINFVTRDDDRMQFDIQRFYSVVIEELPTNVADLL

SEQ ID NO: 410 - DNA, 2244 bp, Physcomitrella patens
ttctttcaaggctgccattctcgtttgacagcgccgtttcgatcgtgcactctttgtcgacgtctcccccgatttccctccgctactattcattgcacaccaaaatggctggatctgcaccagaaggatctcagttcgatgcccgccagtatgacgcgaagatggagaccatcttgggcggcgagggagaggacttcatttccacatgggaggaggtccacgagacgttcgacgtgatgggtcttcacgagaaccttctgaggggcatttatgcgtacggtttcgagaagccgtcggccatccagcagcgcggaatcgtgccgttcacgaaggggttggacgtgatccagcaagcccagtccggtacgggtaagaccgcgacgttttgctcaggcatcctgcagcagttggactaccagcttttggagtgccaagccttggtgttggcacccacccgtgagctggcccagcagatcgagaaggtgatgcgcgcactgggcgactaccttcaggtgaaggtgcacgcgtgcgtgggaggaaccagtgtgagggaggaccagaggattttgcaggcgggtgtgcacgtggtggtgggaacacccgggcgtgtgtacgacatgttgcgcaggaatgcgctgcgcgcggattccatcaagtgcttcgtgctggacgaggccgatgagatgctttctcggggtttcaaggaccagatttacgacatcttccagctgctgccccagaagcttcaagtgggcgtgttctccgccaccatgcccccggaagccctcgagatcacgaggaagttcatgaacaagccggtgaagatcctggtgaagagggacgagttgacgctggagggtatcaagcagttctacgtgaacgtggaccgcgaggagtggaagttggacaccctgtgcgacctgtacgagacattggcgatcacccagagcgtgatcttcatcaacacccggcggaaggtggactggttgacggacaagatgcgcgcccgtgaccacaccgtgtcggccactcacggagacatggatcagaacacccgggacatcatcatgcgagagttccgttcggggtcttcccgagttttgatcacaacggacctgttggcgcggggtatcgacgtgcagcaggtgtctttggtgatcaactacgacctgccaactcagccggagaactaccttcaccgtatcggtcgcagtgggcggttcgggcgcaagggagtagcgataaactttgtgacgaaggaggacgagcgcatgctccaggacatccagaggttctacaacaccgtggttgaggagctcccgtcgaatgtcgcggatcttctgtaggtcggggatagttctgcagcagcacaaggatcgggagcagtattttctcaaggtctgcttaaggatcctgtgtaaagttttggaacggctcctttgttagaatccacgtcgttgtcgcctgtcggttctgcccatatgcgtttgtactgcggtggtgcattacgcttgctagtctgaagagaaggaacagtgggagatgcggcctcgagaggccttgagttgcagatttaggggcagaggcatgtgggtcccaaatgaggccaaattcctgccacttgctgtcggtgttactgtgggggtgggtcgattgccctcgccttggccacagggaggctttgcgtgttgtactgccgggaatgcagacggtggtggtgcgaggaagaccgtattgtgctgtgcatctgtgcaaacgttgtgggctacgggtccgggactgatgcagggtcatcgatacgacgtcttgttgtttttgttgcagtgggtgtatggagtgtgttggtcagtcggagcacttccattatctcgggctatggcaccggtcgtcgatggttgtcgatgttggtgcgaggaaggacgagcagtgattggtcactttggagggtcctctctgggtcgtttgaggcgtggttgctcgagttgtcgcaaggttgcgagcatgcggagccaggtagtgcaggagtcagagctgacggggaatgagggactgcaaggtcgtttgtgtaccgctggggacctagaagcatggagaagtcattggatgcgtacaagtcgcagtgcaagtcgcaccaccatatcgttttcctcgcactcttggggtggcgtaggggtacaggggggcacacattaccatactcgtaatgcaatatttcttagacggaaaaactgttttgatgattga

SEQ ID NO: 411 - protein, 413 aa, Physcomitrella patens
MAGSAPEGSQFDARQYDAKMETILGGEGEDFISTWEEVHETFDVMGLHENLLRGIYAYGFEKPSAIQQRGIVPFTKGLDVIQQAQSGTGKTATFCSGILQQLDYQLLECQALVLAPTRELAQQIEKVMRALGDYLQVKVHACVGGTSVREDQRILQAGVHVVVGTPGRVYDMLRRNALRADSIKCFVLDEADEMLSRGFKDQIYDIFQLLPQKLQVGVFSATMPPEALEITRKFMNKPVKILVKRDELTLEGIKQFYVNVDREEWKLDTLCDLYETLAITQSVIFINTRRKVDWLTDKMRARDHTVSATHGDMDQNTRDIIMREFRSGSSRVLITTDLLARGIDVQQVSLVINYDLPTQPENYLHRIGRSGRFGRKGVAINFVTKEDERMLQDIQRFYNTVVEELPSNVADLL

SEQ ID NO: 412 - DNA, 1671 bp, Prunus persica
cgcagatccgaggagtttgggaaaccctagctctcttttagcaacctactattctcctctgttttctctctctagcgctcatcaacatcatcagtcatggcaggtgttgcacccgaaggatcacagtttgatgcaaagcaatatgacactaaaatgagtgaattgctctcaactgatggacaagagtttttcacatcatatgatgaagtttatgaaagttttgattccatggggttgcaagaaaatcttctgaggggaatttatgcttacggttttgagaagccttctgcaattcagcaaaggggaattgttccattctgcaaaggcctcgatgtgattcaacaggctcagtctggaaccggaaaaactgcaaccttctgctctggaattttgcagcaacttgattatgctgtagtccagtgccaggctttggttttggcacctaccagggagttggcacagcagattgagaaggttatgcgagcacttggtgactatcttggcgtgaaggttcatgcctgtgtaggcgggacaagtgttcgtgaggatcagcgcattcttcaagctggtgttcatgttgttgttggaacccctggtcgtgtatttgacatgttgcggaggcagtctcttcgtccagattacatcaagatgtttgtgttggatgaggccgatgaaatgctttctcggggttttaaggaccagatctatgacattttccagcttctgccatcaaaagttcaggttggggtgttctctgctacaatgccacctgaagcacttgaaatcacgaggaagtttatgaacaaacctgtgaggatcttggtgaagcgtgatgagctcacccttgagggtatcaagcaattttatgtcaatgttgataaagaagaatggaagcttgagacactttgtgatctgtatgagaccctggccatcacccagagtgtcatttttgttaatacacggcgaaaggtggactggcttactgacaagatgcgaagccgtgaccacactgtctcagctactcatggtgacatggaccagaacactcgtgacattatcatgcgtgaattccgctctggctcgtcccgtgttctcataaccactgatcttttggctcgtggtattgatgtgcagcaggtatctctcgtcataaattatgatttgccgacccaaccagagaattaccttcatcgtattggtcgaagtggaaggtttggaaggaagggtgttgccattaactttgtgactagggatgacgagagaatgctctatgacattcagaggttttacaatgtggtcattgaggagctgccatcaaatgtcgctgatctgctctgaggagatgattttgttttgcttttctttttgaggcagattttctttatcctgttttgaaagtactattttaatgcttttttgtcattttgttttttttttcatcaatttatgctgtcaaacatatctaactgtttaatggtatgcgccttcttgctcaatttcgtcgtatgaaaaaaagacttttaggatgtctgtctcatacttgggctgtgcttctggctttttgttatttggttttcagtcagttttctgttgtacctattattttgttcttaccttgagaatttagtacacaagaggggtaattttgctcttaccttgacaattttgtct

SEQ ID NO: 413 - protein, 413 aa, Prunus persica
MAGVAPEGSQFDAKQYDTKMSELLSTDGQEFFTSYDEVYESFDSMGLQENLLRGIYAYGFEKPSAIQQRGIVPFCKGLDVIQQAQSGTGKTATFCSGILQQLDYAVVQCQALVLAPTRELAQQIEKVMRALGDYLGVKVHACVGGTSVREDQRILQAGVHVVVGTPGRVFDMLRRQSLRPDYIKMFVLDEADEMLSRGFKDQIYDIFQLLPSKVQVGVFSATMPPEALEITRKFMNKPVRILVKRDELTLEGIKQFYVNVDKEEWKLETLCDLYETLAITQSVIFVNTRRKVDWLTDKMRSRDHTVSATHGDMDQNTRDIIMREFRSGSSRVLITTDLLARGIDVQQVSLVINYDLPTQPENYLHRIGRSGRFGRKGVAINFVTRDDERMLYDIQRFYNVVIEELPSNVADLL

SEQ ID NO: 414 - DNA, 1800 bp, Prunus persica
caaaactttctctctctctctgtctctctctcgctcattccttaactccgcggcttagatccgaggagtttgggaaaccctaattttctgaaaacaagccaaagctctcttcggtcgctctctcttcgctttcaccttctcaccgatcatcggcagtcatggcagctccagaaggatcacaatttgatactcgtcagtatgattccaaaatgactgagctacttgcaactgatgggcaggaattctttacatcatatgatgaagtttatgatagttttgattctatgggtctgcaagagaatcttctgaggggcatttatgcttacggttttgaaaaaccctcagctattcagcaaaggggaattgttccattctgcaagggtcttgatgttattcaacaggctcagtctggaactgggaagacagcgactttctgttctggtattcttcaacagcttgattatggtttgacagaatgccaggccttggttcttgccccaactcgagagcttgctcaacagattgagaaggtcatgagggctctgggagactatctgggtgtgagggtccatgcttgtgttggtggaaccagtgttcgtgaagaccagcgcattctgtcaaacggggttcatgttgttgtgggcactcctggtcgtgtttttgacatgctaaggagacagtcgcttcgtcctgataacatcaaaatgtttgttttggatgaggctgatgagatgctttcccgaggtttcaaggatcagatctatgatatatttcagcttctgccatcaaagattcaagttggggtgttctctgccacaatgccacccgaggcccttgagatcacaaggaagttcatgaacaaacctgtgaggattcttgtgaagcgtgatgaactcaccctggagggtataaagcaattttatgtcaatgttgacaaggaggaatggaagcttgagactctttgtgatctttatgaaactttggccattacccagagtgtcattttcgtcaatactcgacgcaaggttgattggttgactgacaaaatgcggagccgagaccatacagtttctgccacccatggagacatggaccagaacaccagagacatcatcatgcgggagttccgttctgggtcatctcgtgtcttgatcaccactgatcttctggctcgtggtattgacgttcagcaagtctcccttgttataaactatgacctgcctacccagccagagaactacctccacagaattgggcgtagtggacgattcggcaggaagggtgttgccatcaactttgtaacaaaggatgatgagaggatgctgtttgacatccagaagttctataacgtgcttgtggaggagctgccatcgaatgttgctgatctcctctgatgagattttgtcctctttagaaaattaccaaggaaaagctggtttctgcttagtagtaagtgttgttttgtttgaagtttattttctgtttttcgtcgttccagccgccacatccaccattttgtgtcttctcttattattattaccttatcattattataggtctagttctttataatttatggttgttggatactattttaagtggtacaagtgcacttgcaatgtgaaaaccatcattgccttgatcggttgtggtagcaactgttgttgcataacatatcttctagctactaatatgtatgtattttttgagttgaactttggtttttttgatgttttaattttggttttgatggctgttgtgattcgatgattgtaatggatggtcaaacgctagttttgt

SEQ ID NO: 415 - protein, 411 aa, Prunus persica
MAAPEGSQFDTRQYDSKMTELLATDGQEFFTSYDEVYDSFDSMGLQENLLRGIYAYGFEKPSAIQQRGIVPFCKGLDVIQQAQSGTGKTATFCSGILQQLDYGLTECQALVLAPTRELAQQIEKVMRALGDYLGVRVHACVGGTSVREDQRILSNGVHVVVGTPGRVFDMLRRQSLRPDNIKMFVLDEADEMLSRGFKDQIYDIFQLLPSKIQVGVFSATMPPEALEITRKFMNKPVRILVKRDELTLEGIKQFYVNVDKEEWKLETLCDLYETLAITQSVIFVNTRRKVDWLTDKMRSRDHTVSATHGDMDQNTRDIIMREFRSGSSRVLITTDLLARGIDVQQVSLVINYDLPTQPENYLHRIGRSGRFGRKGVAINFVTKDDERMLFDIQKFYNVLVEELPSNVADLL

SEQ ID NO: 416 - DNA, 1619 bp, Pisum sativum
gatccggggagtttttgggaaaccctagctccgttcaactaacgccgtcgcattttcttcttcacctccgaatcttcaagctatggcaggccttgcacccgaggggtcacaatttgatgctgggaaatttgatgccagaatgaatgacttaatggctggtgatggaaatgagttctacactatttctgacgaggtttgtgaaagttttgatgctatgggcttgcaagagaatctcctcaggggcatttatgcttatggttttgaaaagccatctgccattcagcaaaggggaattgttcctttctgcaagggacatgatgttattcaacaggctcagtctggaactggaaagacggcaactttctgctctggtgttctgcagcaacttgactacaatgtgacccagtgccaggccttggttttggccccaactcgtgagcttgctcaacaaattgagaaggttatgcgggcccttggagactatctaggtgttaaggtgcatgcttgtgtgggaggtacaagtgttcgtgaagatcaacgcattctatcaagtggtgtccatgttgtggttggtactcctggtcgtgtgtttgatatgttgcgcagacagtccctccacccggattacatcaagatgtttgtgttggatgaggctgatgaaatgctctctagaggtttcaaagatcagatctacgatatatttcagcttctgccaggtaagattcaagtaggagttttctctgctacaatgcctcctgaggcacttgaaatcacaaggaagtttatgaacaaacctgtgaggatccttgtgaagcgggatgagctcaccttggagggtattaagcagttttatgtcaatgttgagaaagaggaatggaagctggacacactctgtgatctttacgagacattagcaatcactcagagtgtcatttttgttaacactagaaggaaagttgattggttgactgacaagatgcgaagccgagaccatacagtctcagctactcacggagacatggatcagaataccagggacattattatgcgtgaattccgttctgggtcttcacgtgttttgataactaccgatcttttggcacgtggtattgatgtacaacaggtgtctctggttatcaattttgatctccctacacagcctgagaactatctccaccgtattggtcgtagtggaaggtttggtagaaaaggtgttgccattaactttgtcaataaggaagatgaagcaatgctgcaagatatccagaagttttacaacgtgttagtcgaggagctgccatcaaatgtcgctgagctcctctgatgagattttgccctccatattagacgcaaattagtactttttggtggtaagtgttatggtgatgtttaccctcccactcagtttttggttttatttctgcttttgaacttatttgtttgaaagtcttggtaatttaagttgcactgtcaggtaagtactttgtgtaattctgttattggccaaattagtgttggatactcttgcacatttctagaaggcaaattttctagtgtaagttttaacatcacttaaacttcaaatacattgatgtagttttattgaagtatttagactc

SEQ ID NO: 417 - protein, 413 aa, Pisum sativum
MAGLAPEGSQFDAGKFDARMNDLMAGDGNEFYTISDEVCESFDAMGLQENLLRGIYAYGFEKPSAIQQRGIVPFCKGHDVIQQAQSGTGKTATFCSGVLQQLDYNVTQCQALVLAPTRELAQQIEKVMRALGDYLGVKVHACVGGTSVREDQRILSSGVHVVVGTPGRVFDMLRRQSLHPDYIKMFVLDEADEMLSRGFKDQIYDIFQLLPGKIQVGVFSATMPPEALEITRKFMNKPVRILVKRDELTLEGIKQFYVNVEKEEWKLDTLCDLYETLAITQSVIFVNTRRKVDWLTDKMRSRDHTVSATHGDMDQNTRDIIMREFRSGSSRVLITTDLLARGIDVQQVSLVINFDLPTQPENYLHRIGRSGRFGRKGVAINFVNKEDEAMLQDIQKFYNVLVEELPSNVAELL

SEQ ID NO: 418 - DNA, 1792 bp, Picea sitchensis
tcccgctctttgtgccgttgctgctgctgtctgctttgctctgcgaattcgcctcccgaaccatttctgctattcgatctcagcttggtttaaattttcaatcatggccggagtggtagcagatgcaactttgttcgacgctcgtcagtatgacgccaagatgaaggaaatactttcaacagaaggagacgagctcttcgcaagctacgatgaagttcacgagagcttcgatgaaatgggcctacacgagaatcttctcagaggcatctatgcctatgggtttgagaagccgtctgcgattcagcagaggggaatagtgccgttctgtaagggtcttgatgtgatacagcaagcccagtccggaacgggcaagacagcgactttctgttccggaattctgcagcaactcgactatggcttgctggattgccaggctttggttctcgcccccacccgagagcttgcacagcaaatcgagaaggtcatgcgcgctctcggggattacttgcaggttaaagttcatgcctgcgtaggtggaaccagtgttcgtgatgatcagcgtattctcatgagtggagttcatgttgttgttggaaccccaggccgtgtgtttgacatgttgcgcaggcactctcttcgccccgattacatcaagatgtttgtgttggacgaagccgatgaaatgctttccaggggtttcaaggatcagatctatgatatttttcagctgctcccttcaaagattcaggtgggcgttttctctgctacaatgcctcctgaagctcttgagatcaccaggaaattcatgagtaagcctgtgaggattctagtgaagagggatgagttgacacttgagggtatcaagcagttctatgtgaacgttgaaaaggaggattggaaacttgatacattgtgtgatctgtatgaaacactggcaatcacacaaagtgttatttttgttaacaccaggcgaaaggttgactggctgactgacaagatgagagctcgtgaccacacagtctctgctactcatggggacatggatcaaaacaccagggatattattatgagggaatttcgatctggatcctcacgtgttctgattacaactgatctgctggcccgtggtattgatgtgcaacaagtctcactggtcatcaactatgaccttcctacccaaccagaaaactacctccatcgaattggtcgtagtggcaggtttggaaggaagggcgtggcaattaactttgttacaaaggatgatgagagaatgctacaagacattcaaaggttctacaatgtggttgtcgaggagcttccttctaatgttgctgatcttctttgaggttttgttctgtgctttgaaagaaagttctcgtgagatattcaacttatcatttttatttttattgtcagacaattctttatcttggctcaaaacaagtgacgtgttttgagtagttatcttttgggcctttaaatttgagatttcttagtattggagtaggtgtcgggtagtaaaaacttgctattcacccagatagagactcggctttttattcaagtttatgtatgttggtggtatttgacataaaaattctgatgtggtacaggcaacagtaattttttgatgtttctgagttgtctgtattgtttgatttattccattgttgaagctcttgtgtatgagatgcactccttggaaattttgtacgagttggattctttgtgctatcaattgtcacatgcaattaggcattgtgcctgttattatatgacgcaatatttttct

SEQ ID NO: 419 - protein, 413 aa, Picea sitchensis; identical to SEQ ID NO: 405

SEQ ID NO: 420 - DNA, 1719 bp, Pinus taeda
ggaaaatttgttacttagagagttcatacggcggcggaggtgctttcagtgacctccacctcaattatcttccgctattttttatcacggaaatcttcgcttcagcttcctttttaagatcaagggtttctcagcgaaaaggtaaaactaggaaatggcagctgcggatccggccggaaacaacttcgacgccaagagctatgacaaaaacatgcagagcgtccttggaggagaagagctttactctacctgggaggaggttcatgaaacttttgactccatggggcttcaggaaaaccttttaagaggaatttatgcatatggttttgagaagccatctgccatccagcagagagggattgttcctttctgccaaggtcttgatgttatccagcaagcacaatcaggaacaggaaagactgccactttctgttcaggaattctacaacagttggactacagtatccctgagtgtcaagctctagttttggccccgacacgagaactagcccagcagatagagaaagttatgagggcacttggtgattaccttcaagtaagagtacatgcatgtgttggtgggacaagcatccgagaggacctccgtattctccaagctggtgttcatgttgttgtggggacaccgggtagggtctatgacatgctgcggcggcgtgccttgcgtccagactcaatcaaaatgtttgtgcttgatgaagcagatgaaatgctatcacgtggatttaaggatcagatatatgatatctttcaattgctacctgcaaatctccaagttggtgttttctctgccaccatgcctcctgaggccttggagattacgaggaagttcatgactaatccggtcaggattcttgtgaaaagagacgagcttacgctggagggtatcaaacaattctatgttaatgtagagcgagaggattggaagcttgatacactatgtgatctgtatgaaactttggcaatcacacagagtgtgattttcatcaataccaggaggaaggtagattggctgacagatcaaatgcgagctcgggatcacacagtttctgcaacccatggtgacatggatcagaacacaagagacatcattatgagggaattcaggtctggatcttctcgagtcctgatcaccactgatctattggcccgaggtattgatgtacaacaagtgtctcttgttatcaactatgacttaccaacacagcctgaaaactaccttcaccgtattggtcggagtggacgatttggcaggaagggtgtggccatcaactttgttaccaaagatgacgagagaatgctgcaggacatacagagattctataacgtggtaattgaagaattgccaagtaatgttgctgatttaatataaagatattgcacaagcagcattatctgtactatgccgtgtgcagtgagttgagtacgttatcttttgggttgaatactcttccgccctcttgattctgtaaattgttaacaactattttgttcggtgaaacattctgtatttcttggaccttgcttaacggtattgctttgttgtaaatcttatctgagagggagccattttaagctctttgctcgccctctcagggttttataagtttattcataatacaaggttgagagagtgtagtgactgttttctgcacttggatgttatgcctattttgaaatttaatggatcaaacttattag

SEQ ID NO: 421 - protein, 411 aa, Pinus taeda
MAAADPAGNNFDAKSYDKNMQSVLGGEELYSTWEEVHETFDSMGLQENLLRGIYAYGFEKPSAIQQRGIVPFCQGLDVIQQAQSGTGKTATFCSGILQQLDYSIPECQALVLAPTRELAQQIEKVMRALGDYLQVRVHACVGGTSIREDLRILQAGVHVVVGTPGRVYDMLRRRALRPDSIKMFVLDEADEMLSRGFKDQIYDIFQLLPANLQVGVFSATMPPEALEITRKFMTNPVRILVKRDELTLEGIKQFYVNVEREDWKLDTLCDLYETLAITQSVIFINTRRKVDWLTDQMRARDHTVSATHGDMDQNTRDIIMREFRSGSSRVLITTDLLARGIDVQQVSLVINYDLPTQPENYLHRIGRSGRFGRKGVAINFVTKDDERMLQDIQRFYNVVIEELPSNVADLI

SEQ ID NO: 422 - DNA, 1855 bp, Pinus taeda
  misc_feature (1843)..(1843): n is a, c, g, or t
cccaagcggtaataaggcggcggaggcgatctcataggtcgctaacatcttgggctatttttagcacgggaattttcacttcggcgtctcttcgcagatcgagggtttctcaggcaaaaataagataaaattcgaaaatggcgggtgttgaagcggctggaaacaacttcgacgccaagaactatgacaaaaacatgcagagtgtccttggaggagaagaactttattctacctgggaggaagtgaatgaaacctttgactctatggggcttcaggaaaaccttctaagaggaatttatgcgtatggttttgagaagccatctgctatccaacagagagggattgttcctttctgtcaaggtcttgatgttatccagcaagcgcaatcaggaacaggaaaaactgcaactttctgttcaggaattctacaacagttggactacaatgttccagagtgtcaggcactagttttggccccaactcgagaactagcccagcagatagagaaagttatgagggcacttggtgattacctacaagtaagagtacatgcatgtgttggtgggacaagcattcgagaggatctccgtattctccaagctggtgttcatgttgttgtggggactccaggtagggtctatgacatgctgcggcgccgtgccttgcgtcctgattcaatcaaaatgtttgtactcgatgaagcagatgaaatgctatcacgtggatttaaggaccagatatatgatatttttcaattgctaccttcaaatctccaagttggtgttttctcggctaccatgcctcctgaagctttggagattactaggaagttcatgaataatccagtcaggattcttgtcaaaagagatgagcttaccctggagggtatcaaacagttctatgtcaatgtagaacgtgaggactggaagcttgatacactgtgtgacttatacgaaactttggcaatcacacagagtgtgatttttatcaataccagaagaaaggtagatatgctcacagatcaaatgcgagctcgggatcatacagtgtctgcaacccatggtgacatggatcagaacacaagagacatcatcatgagggaatttaggtctggatcttctcgagtgttgatcaccactgacctattggcccgaggtattgatgtacaacaagtgtctcttgttatcaactatgacttaccaacacagcctgaaaactacctccaccgtattggtcgtagtggacgattcggtagaaagggtgtggccatcaactttattaccaaggatgatgagagaatgctgcaggacatccagagattctataatgtggtagttgaagaattgccgaataatgttgctgatttaatataaatgttttgcagaagcagcccatatgtacggtgcagtgtgcagtgagttgagtacactttatcttttgggttgaaaactcttcctcccttgtgattctgaaaattgttaactactattttgtgtggtggagtaatgtattacttggacctttagtaactgtattgttttgttgtaatctcatatgagagggagccattttaagctcttttcttgccctctcaaggtctttacaagtcagtactcataatatgagcctgagagagtgtaacttctcaaagagtttataagttaatatgcataatatgtcgttgagagagtgtaccctctcaaagtttttgtaacttaatatgcttaatatgaggttgagagaatgtagtgagtgaatattctgcaatctgttattcatagtaccctctcaaagtttttgtaacttaatatgcttaatatgaggttgagagagtgtagtgagntgaatattctgc

SEQ ID NO: 423 - protein, 411 aa, Pinus taeda
MAGVEAAGNNFDAKNYDKNMQSVLGGEELYSTWEEVNETFDSMGLQENLLRGIYAYGFEKPSAIQQRGIVPFCQGLDVIQQAQSGTGKTATFCSGILQQLDYNVPECQALVLAPTRELAQQIEKVMRALGDYLQVRVHACVGGTSIREDLRILQAGVHVVVGTPGRVYDMLRRRALRPDSIKMFVLDEADEMLSRGFKDQIYDIFQLLPSNLQVGVFSATMPPEALEITRKFMNNPVRILVKRDELTLEGIKQFYVNVEREDWKLDTLCDLYETLAITQSVIFINTRRKVDMLTDQMRARDHTVSATHGDMDQNTRDIIMREFRSGSSRVLITTDLLARGIDVQQVSLVINYDLPTQPENYLHRIGRSGRFGRKGVAINFITKDDERMLQDIQRFYNVVVEELPNNVADLI

SEQ ID NO: 424 - DNA, 1732 bp, Pinus taeda
ctcttcctctttgtgccgttgctgctgctgtctgctctgctttgcgaattggcatcgcgaaccatttctgctattcgatctcagcttggattaaatcttaataatcatggccggagcggtagcagatgcgactttgttcgacgctcgtcagtatgacgccaagatgaaggaaatactttcaacagaaggagacgagctctttgcaagctacgatgaagttcacgaaagcttcgatgaaatgggcttacacgagaatcttctcagaggcatctacgcctatgggtttgagaagccatctgcgattcagcagaggggaatcgtgccgttctgcaagggtcttgatgtgatacagcaggcccagtctggaacgggcaagacagctactttctgttccggaattctgcagcaactcgactatggcttgctggaatgccaggctttggttctcgcccccacccgagagcttgcacaacaaatcgaaaaggtcatgcgcgctctcggggattacttgcaggttaaagttcatgcctgcgtaggtggaaccagtgttcgtgatgatcagcgtatactcatgagtggagttcatgttgttgttggaaccccaggccgtgtgtttgacatgttacgcaggcactctcttcgcccagattacatcaagatgtttgtgctggatgaagccgatgaaatgctttccaggggtttcaaagaccagatctatgatatttttcagctactcccttcaaagattcaggtgggtgttttctctgctacaatgcctcctgaagcacttgagatcaccaggaaattcatgagtaagcctgtgaggattctagtgaagagggatgagttgactcttgagggtatcaagcagttctatgttaatgttgaaaaagaggattggaaacttgacacactgtgtgatctgtatgagaccctggcaatcacacaaagtgttatttttgttaacaccaggcgaaaggttgattggttgacagacaagatgagagctcgtgaccacactgtctctgccactcatggggacatggatcaaaacaccagggatatcattatgagggaatttcgatctggatcctcacgtgtcctgattacaactgatctgctggcacgtggtattgatgtgcaacaagtctcactggtcatcaactatgaccttcctacccagccagaaaactatctccatcgaattggtcgtagtggcaggtttggaaggaagggtgtggcaattaactttgttacaagagatgatgagagaatgctacaagacattcagaggttctacaatgtggttgttgaggagcttccttctaatgttgctgatcttctttgaggtcttgttaggaagatcttgcgagatattcaaattatcatttttaattttattgtcggacaattctttatcttggctcataacatgtgacatgttttgaaatctttggggcctatgaatttgagatttattagtatttggtgtaggtgttgggtgctaaaagcttgctgttcacccagataaggactattcaagtttttgtccgttggtcgtatttgacataaaaaattctcatgtgatacagacaacaattttttgatgtttctgagttgtctgtattgtttgatttattccatttgttgaacctctgatgtatgagatgcactccttggaaattttgtaccacttagattatttgtgaaaccaatggttacatgcaatatg

SEQ ID NO: 425 - protein, 413 aa, Pinus taeda
MAGAVADATLFDARQYDAKMKEILSTEGDELFASYDEVHESFDEMGLHENLLRGIYAYGFEKPSAIQQRGIVPFCKGLDVIQQAQSGTGKTATFCSGILQQLDYGLLECQALVLAPTRELAQQIEKVMRALGDYLQVKVHACVGGTSVRDDQRILMSGVHVVVGTPGRVFDMLRRHSLRPDYIKMFVLDEADEMLSRGFKDQIYDIFQLLPSKIQVGVFSATMPPEALEITRKFMSKPVRILVKRDELTLEGIKQFYVNVEKEDWKLDTLCDLYETLAITQSVIFVNTRRKVDWLTDKMRARDHTVSATHGDMDQNTRDIIMREFRSGSSRVLITTDLLARGIDVQQVSLVINYDLPTQPENYLHRIGRSGRFGRKGVAINFVTRDDERMLQDIQRFYNVVVEELPSNVADLL

SEQ ID NO: 426 - DNA, 1380 bp, Populus tremuloides
cgcagatccgaggagtttgggctattattgatttctctattctatcttcagcttcctttcaatctctctcctgttatttcttgctatcaatcactcccagtcatggcaggttcggcaccagaagggtcacaattcgattctaagcaatatgatgccaaaatgagtgatttgctcgcaaatgatggacaagatttcttcacatcatatgatgaggtttatgacacttttgattcaatgggactgcaagagaaccttttgaggggcatctatgcctatggttttgagaagccatctgcaatccagcaaagaggaattgttccattctgcaagggccttgatgtgattcagcaggctcagtcaggaactgggaaaacagcaaccttctgctctggtattcttcagcaacttgattatggtctagtgcaatgtcaagctttggtccttgcgcccactagggaacttgcacaacagattgaaaaggttatgcgggcacttggtgattatcttggtgtcaaagttcatgcttgtgttggtggcacaagtgttcgtgaggaccaacgcattcttcaagctggagttcatgttgttgttggcactcctggtcgtgtgtttgagatgttaagaaggcagtcacttcgtccagattacattaaaatgtttgtcctggatgaggctgatgaaatgctgtcccgtggttttaaggatcagatctatgatattttccagttgctgccatctaaagttcaagttggtgtgttctccgctaccatgccacctgaagcccttgagatcacaaggaagttcatgaacaagcctgtgaggatcttggttaagcgtgatgagcttacccttgaaggtatcaaacagtttcatgtcaatgttgataaggaggagtggaagcttgaaactctctgtgatctatacgagaccctagccatcactcagagtgttatttttgttaacacccgccgcaaggttgactggctgacagacaagatgcgaagccgtgaccacacagtctcagctactcatggtgatatggaccagaacactcgtgatatcattatgcgagaattccggtctggctcttctcgagttctcatcacaactgatctcctggcccgtggtattgatgtgcagcaagtgtcccttgtcataaattatgatctgccgactcaaccagaaaactaccttcaccgtattggacgaagtggacgttttggaagaaagggtgtcgccattaactttgtgacaagggatgatgacagaatgctgtttgatatccagaagttttataatgtggtcatcgaggagctgccatctaacgtggctgatctcctgtgatgagatttttggtgaaaagggtttcttattttccta

SEQ ID NO: 427 - protein, 413 aa, Populus tremuloides
MAGSAPEGSQFDSKQYDAKMSDLLANDGQDFFTSYDEVYDTFDSMGLQENLLRGIYAYGFEKPSAIQQRGIVPFCKGLDVIQQAQSGTGKTATFCSGILQQLDYGLVQCQALVLAPTRELAQQIEKVMRALGDYLGVKVHACVGGTSVREDQRILQAGVHVVVGTPGRVFEMLRRQSLRPDYIKMFVLDEADEMLSRGFKDQIYDIFQLLPSKVQVGVFSATMPPEALEITRKFMNKPVRILVKRDELTLEGIKQFHVNVDKEEWKLETLCDLYETLAITQSVIFVNTRRKVDWLTDKMRSRDHTVSATHGDMDQNTRDIIMREFRSGSSRVLITTDLLARGIDVQQVSLVINYDLPTQPENYLHRIGRSGRFGRKGVAINFVTRDDDRMLFDIQKFYNVVIEELPSNVADLL

SEQ ID NO: 428 - DNA, 1465 bp, Populus trichocarpa
ttacctacctataaataatcttaaacacttaaacaaagcctctttcaaactccacggcgcagatccgaggagtttgggctattattgatttctctattctatcttcagcttcctttcaatctcactcctgttctttcttgctatcaatcactctcatggcgggtttggcaccagaagggtcacaattcgattctaagcaatatgatgccaaaatgaatgatttgctcgcaaatgatggacaagatttcttcacatcatatgatgaggtttatgacacttttgattcaatgggactgcaagagaaccttttgaggggcatctatgcctatggttttgagaagccatctgcaatccagcaaagaggaattgttccattctgcaagggccttgatgtgattcagcaggctcagtcaggaactgggaaaacagcaaccttctgctctggtattctccagcaacttgattatggtctagtgcaatgtcaagctttggtccttgcgcccactagggaacttgcacaacagattgaaaaggttatgcgggcacttggtgattatcttggcgtcaaagttcatgcttgtgttggtggcacaagtgttcgtgaggaccaacgcattcttcaagctggagttcatgttgttgttggcactcctggtcgtgtgtttgatatgttaagaaggcagtcacttcgtccagattacattaaaatgtttgtcctggatgaggctgatgaaatgctgtcccgtggttttaaggatcagatctacgatattttccagttgctgccatctaaagttcaagttggtgtgttctccgctactatgccacctgaagcccttgagatcacaaggaagttcatgaacaagcctgtgaggatcttggttaagcgtgatgagcttacccttgaaggtatcaaacagtttcatgtcaatgttgataaggaggagtggaagcttgaaactctatgtgatctatacgagaccctagccatcactcagagtgttatttttgttaacacccgccgcaaggttgactggctgacagacaagatgcgaagccgtgaccacacagtctcagctactcatggagatatggaccagaacactcgtgatatcattatgcgagaattccggtctggctcttctcgagttctcatcacaactgatctcctggcccgtggaattgatgtgcagcaagtgtcccttgtcataaattatgatctgccgactcaaccagaaaactaccttcaccgtattggacgaagtggacgttttggaagaaagggtgtcgccattaactttgtgacaagggatgatgacagaatgctgtttgatatccagaagttctataatgtggtcatcgaggagcttccatctaacgtggctgatctcctgtgatgagatttttggtgaaaaagggtttcttattttcctagtactattttaacgaattgttttcctttctt

SEQ ID NO: 429 - protein, 413 aa, Populus trichocarpa
MAGLAPEGSQFDSKQYDAKMNDLLANDGQDFFTSYDEVYDTFDSMGLQENLLRGIYAYGFEKPSAIQQRGIVPFCKGLDVIQQAQSGTGKTATFCSGILQQLDYGLVQCQALVLAPTRELAQQIEKVMRALGDYLGVKVHACVGGTSVREDQRILQAGVHVVVGTPGRVFDMLRRQSLRPDYIKMFVLDEADEMLSRGFKDQIYDIFQLLPSKVQVGVFSATMPPEALEITRKFMNKPVRILVKRDELTLEGIKQFHVNVDKEEWKLETLCDLYETLAITQSVIFVNTRRKVDWLTDKMRSRDHTVSATHGDMDQNTRDIIMREFRSGSSRVLITTDLLARGIDVQQVSLVINYDLPTQPENYLHRIGRSGRFGRKGVAINFVTRDDDRMLFDIQKFYNVVIEELPSNVADLL

SEQ ID NO: 430 - DNA, 1399 bp, Phaeodactylum tricornutum
catctcacacacataaacgagcaatgagcgacgagcaacaatacgacgataaacctcctaacgatgcaggtgcggaattaggagaagaaggcctcggcggccttaccgaagccgattttgattccaattgggacgaaaccatcgagtcgtttgatgccatggagttgccggaagaactacttcgtggaatcttttcctacggttttgaaaagccatctgctattcagcagcgtgctatcaaaccgacgattcttgcaaaggatttgattgcccaagcccaatccggtacggggaaaaccgctacttttgcaatcggcaccctagccaggctcgaccccaagcttcgcgaatgtcaggctttgatcttggctcccactcgtgagttggcccagcagattcaaaaggttgtcctggctttaggcgactacatggacattcaggtgcacgcctgtgtcggaggtaccgccgttcgtgacgatatccgtacgcttcaggctggtgtccatgtcgtcgtcggtactcctggtcgcgtcttcgacatgatcaaccgtcgtgcacttcgactcgacagtattcgccagttttttttggacgaggccgatgaaatgctctcgcgtggtttcaaggaccagatctatgatattttcaagttcctccccgaaacggtgcaagtatgtctgttctcagcgaccatgcctttggatgtgctcgaggtcacggagcgctttatgcgtgaaccagttcgtatccttgtcaagaaggacgagttgactctggaaggtatcaagcagttttacatctcagtcgacaaggaagattggaagcttgagaccctctgtgatctttacgagactctgacgatcacccaggcgattatctactgcaatacgcggcgcaaggttgactggctccaagaagaaatgcagaagagagatttcactgtctcgtgcatgcatggagacatggaccagcgtgaacgtgacattattatgcgtgaatttcgttccggttcttcccgtgtgctgattactaccgatcttttggcgcgtggtattgatgttcaacaggtctcgttagtcatcaactttgatctccccaccaaccgtgaaaactacatccatcgtatcggacgttcgggacgtttcgggcgtaagggcgtggctattaactttctcacggaagcagatgtccgctatttgcgtgatattgaacagttttacacgacggaaatcactgagatgcccagcgatgtcgcggatcttctctagcggaattggtccgtacgtacaggttcgtcaactgatcgttgtccgttcttgtgctgtccttggggcttttagcaacagattctgcttggcgtagcaaagtaatctgaaaaagtaagagaaattgtgtgtcg

SEQ ID NO: 431 - protein, 414 aa, Phaeodactylum tricornutum
MSDEQQYDDKPPNDAGAELGEEGLGGLTEADFDSNWDETIESFDAMELPEELLRGIFSYGFEKPSAIQQRAIKPTILAKDLIAQAQSGTGKTATFAIGTLARLDPKLRECQALILAPTRELAQQIQKVVLALGDYMDIQVHACVGGTAVRDDIRTLQAGVHVVVGTPGRVFDMINRRALRLDSIRQFFLDEADEMLSRGFKDQIYDIFKFLPETVQVCLFSATMPLDVLEVTERFMREPVRILVKKDELTLEGIKQFYISVDKEDWKLETLCDLYETLTITQAIIYCNTRRKVDWLQEEMQKRDFTVSCMHGDMDQRERDIIMREFRSGSSRVLITTDLLARGIDVQQVSLVINFDLPTNRENYIHRIGRSGRFGRKGVAINFLTEADVRYLRDIEQFYTTEITEMPSDVADLL

SEQ ID NO: 432 - DNA, 1605 bp, Phaseolus vulgaris
  misc_feature (1542)..(1542): n is a, c, g, or t
catctttgatacgtcgttgtctcaaagccaccgccatcgcccttcgatttttggaaaccctaactccacaattgcctctcacagactcaatcttcttcattatttcgtaattccaacttcttccatcttcctcaaagtttgaaatcatggctgggcaggcaccagaaggatcacaattcgatggtcgtcattatgatgctaagatggatgagttactcggagctgatgggcaagatttttttacttcttatgacgaagtttgcgaaagctttgatgctatgggattgcaggagaaccttctaaggggtatttatgcatacggttttgagaaaccctctgcaattcagcaaagggggattgttcctttctgcaaggggcttgatgtaattcagcaagcacaatctggaactggaaaaactgctacgttttgctctggagttttgcagcagcttgattacagcttagttgagtgtcaggcactagttcttgctcctactcgtgaacttgcacaacaaattgagaaggtcatgcgagcactaggggactatataggtgtcaaggttcatgcttgtgttggtgggaccagtgttcgtgaagatcaacgcatcctttcaagtggggttcatgtagttgttggtactcctggtcgtgtatttgatatgctgcgcagacaatctctgcgccctgatcacatcaagatgtttgtattggatgaggcagatgagatgctctctcgaggttttaaggatcagatctatgatatttttcagctactgcctcctaagattcaggttggggtattctctgccacaatgcctccagaagcgctggaaatcacaagaaagtttatgaacaaacctgtgaggattcttgtaaaacgtgatgagcttaccctggagggcatcaagcagttttttgtcaatgtagacaaggaggaatggaagctggaaacactatgtgatctttatgaaactttggcaatcacccagagtgttatctttgtgaacactagacgcaaggtggattggctgacagacaaaatgcggaatcgtgatcacacagtttcagccacccacggagatatggaccaaaacacaagggatatcatcatgcgggaattccgctccggctcctcccgtgttcttatcaccacagatcttttggcccgtggtatcgatgtccagcaagtctcacttgttataaattatgatctgccaactcagccagagaactatctccatcgaattggtcgtagtggtcggtttgggagaaagggtgttgctatcaattttgtgaccagtgatgatgacaggatgctgcttgacatccaaaagttctataatgtgatggttgaggagctgccagccaatgtaactgatctcatttgatttggtctcccctccattgttgattggtatgatttttattatggaggcctctgtcattgtttcatttttcatggccctggcagggcctttctctggcaagacttgaacttaactccaaaccggtgattttgaaatgggcatacttctctaattntgggtttagcagaatgcgttgctgcaattttgttgcttgcttgtttgtgtatctgtcttacta

SEQ ID NO: 433 - protein, 413 aa, Phaseolus vulgaris
MAGQAPEGSQFDGRHYDAKMDELLGADGQDFFTSYDEVCESFDAMGLQENLLRGIYAYGFEKPSAIQQRGIVPFCKGLDVIQQAQSGTGKTATFCSGVLQQLDYSLVECQALVLAPTRELAQQIEKVMRALGDYIGVKVHACVGGTSVREDQRILSSGVHVVVGTPGRVFDMLRRQSLRPDHIKMFVLDEADEMLSRGFKDQIYDIFQLLPPKIQVGVFSATMPPEALEITRKFMNKPVRILVKRDELTLEGIKQFFVNVDKEEWKLETLCDLYETLAITQSVIFVNTRRKVDWLTDKMRNRDHTVSATHGDMDQNTRDIIMREFRSGSSRVLITTDLLARGIDVQQVSLVINYDLPTQPENYLHRIGRSGRFGRKGVAINFVTSDDDRMLLDIQKFYNVMVEELPANVTDLI

SEQ ID NO: 434 - DNA, 1826 bp, Sorghum bicolor
cctagcccagcctcccctgccctgccctgccctgcccttctcaccccgccacagccgaatcgaatccgagacgccgatctcggattcgcttccaccgccgtagccgcgccctccgtcgtcctcgtcgctctcaccgctcgtctcgtcagccatggcaggattggcaccagaagggtcccagtttgatgacaagcagtatgacaagaaaatgcaggagatactaactgaggacttcttcacttcgtatgatgaagtttgtgagagttttgacaacatggggctacaagagaaccttctgagaggcatctatgcctatggttttgagaagccatcagctattcagcaaagaggaattgttcccttctgcaaggggcttgatgtgattcagcaagcccaatctggaactggaaaaacagctaccttctgttctggaatcttacagcagcttgattatggattggttgagtgccaggccttggttcttgctccaacccgtgagcttgcgcagcaaattgagaaggttatgcgtgctcttggggactatttgggtgtcaaagtgcatgcctgtgttggtggaacatctgtccgtgaggaccaaaggattcttgccagtggtgtgcatgttgttgtgggcacaccagggcgtgtgtttgatatgttgcgtaggcagtctctccgccctgacaacatcaagatgtttgtgctggatgaagctgatgagatgctctcccgtggattcaaggatcagatctatgatatcttccagcttcttccatcgaagattcaagttggtgtgttctcagctaccatgcccccagaggccctagagatcacccgcaagtttatgaacaagcctgtgaggattcttgtcaagagagatgagcttacccttgagggtatcaagcaattctatgtcaatgtggagaaggaagactggaagctcgacacattatgtgacctgtatgagaccctggcaatcacccagagtgtcatctttgtgaacacccgccgcaaggtggactggctcacagacaagatgaggagcagggaccacaccgtctcagccacacacggtgatatggaccagaacaccagggacatcatcatgagggagttcaggtccgggtcctcccgtgtgctcatcaccactgacctgcttgcccgtggtattgatgtccagcaggtctcacttgtcatcaactacgacctgccgacccagcctgagaactaccttcaccgcattggtcgtagtggtcggtttggaagaaagggtgttgccatcaactttgtcacccgcgatgatgagcggatgctgtttgacatccagaggttctacaacgtgaccattgaggagctgccggccaacgtcgctgaccttctctagatgatgtcctctagataatatgggctgctaaggtttctggataaagaagtctgtttttgttaaaatacgccaacttttctctgcttttggaggagtggtaaggtcgggttctattcgaattgtggcgaaggatggtttctaagttcattttctcgtatgcaacatttcggaatttttgtagcgagtaggctatgtgccgctcctgggttagctgggtgctgagacactactggagtatttttacattcactgttatgaatcattcctgtcgctgtgtaccttctgtttgctgaagatgtgggggtatcaagcagaacctgcgtagacgatgctacatacctcccatcgtagaaattatgcaattctagtgattcagtctagatcacaatgtcttaatttcgtcagatttgtagaaaacagtttatgcgatttaaaaataggt

SEQ ID NO: 435 - protein, 410 aa, Sorghum bicolor
MAGLAPEGSQFDDKQYDKKMQEILTEDFFTSYDEVCESFDNMGLQENLLRGIYAYGFEKPSAIQQRGIVPFCKGLDVIQQAQSGTGKTATFCSGILQQLDYGLVECQALVLAPTRELAQQIEKVMRALGDYLGVKVHACVGGTSVREDQRILASGVHVVVGTPGRVFDMLRRQSLRPDNIKMFVLDEADEMLSRGFKDQIYDIFQLLPSKIQVGVFSATMPPEALEITRKFMNKPVRILVKRDELTLEGIKQFYVNVEKEDWKLDTLCDLYETLAITQSVIFVNTRRKVDWLTDKMRSRDHTVSATHGDMDQNTRDIIMREFRSGSSRVLITTDLLARGIDVQQVSLVINYDLPTQPENYLHRIGRSGRFGRKGVAINFVTRDDERMLFDIQRFYNVTIEELPANVADLL

SEQ ID NO: 436 - DNA, 1973 bp, Sorghum bicolor
gactcgtccactccacaccgcaggcacagcgcgcctcccccttaaaagccgcctctcgccgccgcccgcaaaccctcgtttttctctctcctgcgctgcgccgtccctcagcctcacctccgccgccgaatccgagactccgatctcgggttcaccgcagcgcacagagcacccccaccgactgtcccccggcccgatccgcgctctcatctccgtcgcttcagtcatggcaggaatggcacctgagggttctcagttcgatgctaagcactatgattctaaaatgcaggagctgctgagcactggtgagactgaggagttcttcacttcatatgatgaagtttttgagagttttgatgacatgggtctccaagagaatcttctgagaggcatttatgcttatggttttgagaagccttctgcaattcagcagagaggaattgttcccttctgcaaggggcttgatgtcattcagcaagcacaatctggtacaggaaaaacagcaactttctgttctgggatcttgcagcagcttgattatggcctggtggaatgccaggccttggtccttgctcccacccgtgagcttgcacagcaaattgagaaagtcatgcgcgcacttggtgactacctgggtgttaaggtccatgcatgtgtgggaggaacatctgtccgtgaggatcaaaggattcttgccagtggtgtgcatgttgttgttggtacacctggtcgtgtttttgacatgctgcgtaggcagtccctccgccctgataacatcaagatgtttgtgcttgatgaagctgatgaaatgctttctcgtggtttcaaggatcagatttacgacatcttccaacttcttccagccaagattcaggttggagtcttctctgctaccatgccccctgaggcccttgagatcacccgcaagttcatgaacaagcctgtcagaatccttgtgaagagagatgagctgactcttgagggtatcaagcagttctatgtgaatgtggagaaggaagactggaagctggacacactgtgtgacctgtacgagaccctggccatcacccagagtgtcatcttcgtcaacacccgccgcaaggtggactggctcactgacaagatgaggagcagggaccacactgtctctgccactcacggtgacatggaccagaacactagagacatcatcatgagggagttccggtctggttcctcgcgtgtgctcatcaccaccgacctgcttgctcgtggtattgatgttcagcaagtgtccctggtcatcaactatgatcttcccacccagccagagaactacctgcatcgcattggtcgtagtggtcgtttcggtaggaagggtgttgccatcaactttgtgacccgcgacgacgagcggatgctgtttgacatccagaagttctacaatgtggtgattgaggagctgcctgccaatgttgctgaccttctgtgatcattttgaagaaaaactgaacaaaaaaaagggaggcgaggggaactgataaggcttggttttgtcgaaatatcgcgggggaggaagtgatatggtcggtggggtttctatgttaaagtcgtggtcatggacaatttgtggtttttctttatgccatgttttgggaatttttgtagctgcctaggccttgtggtatgtgctgctgtgggggttcattagtatcaagaggaagacgctgctggcgctggagtgtttttctctttattagtactttgtttaaaactatgtatgaccgaatgatggtatttatttgtgtcatccttgactcttattctgctgcaaccagatgtatcgttccatgtgtttgcagcacttgtttttgctgctctgagtaaaacctttttactcggttgagcttgtcaactgttggtgcacggcctacggtaatgtatttcgaagtggtactactacgcaagatgtggcactggcgttttgtaatagt

SEQ ID NO: 437 - protein, 414 aa, Sorghum bicolor
MAGMAPEGSQFDAKHYDSKMQELLSTGETEEFFTSYDEVFESFDDMGLQENLLRGIYAYGFEKPSAIQQRGIVPFCKGLDVIQQAQSGTGKTATFCSGILQQLDYGLVECQALVLAPTRELAQQIEKVMRALGDYLGVKVHACVGGTSVREDQRILASGVHVVVGTPGRVFDMLRRQSLRPDNIKMFVLDEADEMLSRGFKDQIYDIFQLLPAKIQVGVFSATMPPEALEITRKFMNKPVRILVKRDELTLEGIKQFYVNVEKEDWKLDTLCDLYETLAITQSVIFVNTRRKVDWLTDKMRSRDHTVSATHGDMDQNTRDIIMREFRSGSSRVLITTDLLARGIDVQQVSLVINYDLPTQPENYLHRIGRSGRFGRKGVAINFVTRDDERMLFDIQKFYNVVIEELPANVADLL

SEQ ID NO: 438 - DNA, 1572 bp, Saruma henryi
ggtcgtagctttgttccagcaactccacggcgtaggtcagaggtgttcgggaagtaaaaaccctaactcttcgcttctctctgatctttcctctttttcaaccttcctcgatcgaataccagtaaagacagtcatggcaggattggcaccagaaggatctcaatttgatgcacggcagtatgatgctaagatgaatgaagtgctttcagttgagggtcaagatttttttacctcttatgacgaggtttatgaaagctttgattccatggggttgcaggaaaaccttctaagagggatctatgcatatggttttgaaaaaccctctgcaatccaacagaggggaattgtgcctttctgcaagggacttgatgtcattcagcaagcacaatctggtacaggcaaaactgcaaccttctgctctggaattcttcagcaacttgattacggtctggtagagtgtcaagctttggttcttgccccaacgcgagaacttgcgcaacaaattgaaaaggtcatgcgagcacttggtgattatctaggtgtgaaggttcatgcatgtgttggtggcacaagtgtcagggaagaccagcgcattctttcaagtggggttcatgttgttgttggcaccccaggtcgtgtttttgacatgttgcgtaggcaatctcttcgaccagactgcattaagatgtttgtgctggatgaagctgatgaaatgctttcacgtggtttcaaggaccagatctatgacatattccagctccttccttctaaagttcaggttggggtcttctctgccacaatgccgccagaggcacttgaaattacccgcaaatttatgaacaagcctgttcggattttggtcaagcgtgatgagctcacccttgagggtatcaagcagttttatgtcaatattgaaaaggaggagtggaagctggagactttatgtgacctgtacgagacattggccatcactcagagtgtcatttttgtgaacactcgacgcaaggtcgattggctgacggacaagatgcgcagccgggatcacacggtctcagccacccacggggacatggatcaaaatactagagatatcatcatgcgggaattccgatcaggttcctcgcgtgtgctcatcaccactgaccttttagcccgtgggattgatgtacagcaggtctctcttgtcataaactatgatctgccaactcaacctgagaactatctccaccgtataggtcgtagtggacgttttggaaggaagggtgttgcgatcaacttcgtggtccaagaagacgagaggatgctctccgacatccaaaggttttataatgttgtggtagaggagctgccgtcaaatgttgcagacctcctctgaagcggggttttctatatttctctcttttttcttttttctttgattgagataaagagctttttatttgggtaaaatattattgcttctaaatgtcagtcatttagcggtttactatcttcacatttgcaaaactttacatgacttgtgattgggagactttaagttctcataatttggtttcatgtctttgccattcc

SEQ ID NO: 439 - protein, 413 aa, Saruma henryi
MAGLAPEGSQFDARQYDAKMNEVLSVEGQDFFTSYDEVYESFDSMGLQENLLRGIYAYGFEKPSAIQQRGIVPFCKGLDVIQQAQSGTGKTATFCSGILQQLDYGLVECQALVLAPTRELAQQIEKVMRALGDYLGVKVHACVGGTSVREDQRILSSGVHVVVGTPGRVFDMLRRQSLRPDCIKMFVLDEADEMLSRGFKDQIYDIFQLLPSKVQVGVFSATMPPEALEITRKFMNKPVRILVKRDELTLEGIKQFYVNIEKEEWKLETLCDLYETLAITQSVIFVNTRRKVDWLTDKMRSRDHTVSATHGDMDQNTRDIIMREFRSGSSRVLITTDLLARGIDVQQVSLVINYDLPTQPENYLHRIGRSGRFGRKGVAINFVVQEDERMLSDIQRFYNVVVEELPSNVADLL

SEQ ID NO: 440 - DNA, 1596 bp, Solanum lycopersicum
aatattgtcttcctgaactacgcggcgtagatccgaggagtttttggaaaaaagctgcagtctttacaaaccctaattctcaagaatcccctttttctcaaatcttcagatctctctttaacaatcttcttgttagctacaagtatggcaggctcggcaccagagggttctcagtttgatgctcgtcaattcgatgcgaaaatgacggagctacttggtactgaacaacaagattttttcacatcatatgatgaggtttatgacagctttgatgccatgggtttgcaagaaaaccttctgagaggcatctatgcctatggttttgagaagccatcagctattcagcaaaggggcatcgttcccttttgcaagggccttgatgttatccagcaggcacaatcgggaactggaaagacggcaactttctgctctggagttctccagcaacttgattacagtttagttgaatgtcaggctcttgttcttgcaccaacccgtgagctggcacaacagattgagaaggttatgcgtgcgctcggagactatctgggcgtgaaggttcatgcgtgtgttgggggtaccagtgtccgtgaggatcagcgtatccttcagagtggtgttcatgtggtagttggtactccaggccgtgtctttgacatgttgcgcagacagtctcttcgccccgaccacatcaagatgtttgttttggatgaagctgatgaaatgctctctagaggtttcaaggatcagatttatgatatattccagcttttgccaccaaagatccaagtgggtgttttctctgctacaatgccaccagaggctcttgagattactagaaaattcatgaacaagccagtgagaattctcgtgaagcgtgatgagctcactcttgaaggtattaagcaattctatgtcaacgtcgataaggaagagtggaaacttgaaacactttgtgatctttacgagaccttggccatcacccagagtgtcatctttgtcaacaccaggcgaaaggttgattggctcactgacaaaatgcgtggtcgtgatcacacagtatctgcaactcacggagacatggatcagaacactagggatatcattatgagggagttccgatctggctcatctcgtgtgcttatcaccaccgatctccttgctcgtggtattgacgtccaacaagtctcccttgtcatcaactatgacctgccaactcaaccagaaaactacctgcatcgtattggtcgtagtggacgatttggaaggaagggtgttgctatcaactttgttaccaaggatgatgaaaggatgctttttgacattcaaaagttttacaacgtcgtaatcgaggagctcccagccaatgttgctgatctcctttgaggtggttttggctctgtgagggggaattgttccttccctacaagtagtagtctaatatatttattcagagtgaacaactgcaaattttgtctggtttttgtgttattttgtttttggaagtgtccaaataactttggatttggtggttgttttgaattgtttatttgaactatttttctatgaatgttaggcttttagttaatgttttct

SEQ ID NO: 441 - protein, 413 aa, Solanum lycopersicum
MAGSAPEGSQFDARQFDAKMTELLGTEQQDFFTSYDEVYDSFDAMGLQENLLRGIYAYGFEKPSAIQQRGIVPFCKGLDVIQQAQSGTGKTATFCSGVLQQLDYSLVECQALVLAPTRELAQQIEKVMRALGDYLGVKVHACVGGTSVREDQRILQSGVHVVVGTPGRVFDMLRRQSLRPDHIKMFVLDEADEMLSRGFKDQIYDIFQLLPPKIQVGVFSATMPPEALEITRKFMNKPVRILVKRDELTLEGIKQFYVNVDKEEWKLETLCDLYETLAITQSVIFVNTRRKVDWLTDKMRGRDHTVSATHGDMDQNTRDIIMREFRSGSSRVLITTDLLARGIDVQQVSLVINYDLPTQPENYLHRIGRSGRFGRKGVAINFVTKDDERMLFDIQKFYNVVIEELPANVADLL

SEQ ID NO: 442 - DNA, 1236 bp, Selaginella moellendorffii
atggctggcttggcacccgagacctctcaattcgatccccggcagtatgaccagaagatggagtttgcgttggaaggagacgatgtgatatcgagctgggacgaggtgaacgagacattcgactccatgggcttgcacgagaatctgctgcgagggatctacgcctacggctttgaaaagccctctaccatccagcagaggggaatcgtgccgttttgcaaggggattgacgtgatccagcaggcccagtccggcaccggcaagacggccacgttttgctccggcatcctgcagcagctcgactacaacaatgtcgagtgccaggcgctggtgctggcgcccaccagggagctggcgcagcagatcgagaaggtgatgcgggcgctgggtgactacctgcaggtgaaggtgcacgcctgcgtcggcggcaccgacgtccgccaggaccagagaatcctgcaggccggcgtccatgtggtggtaggcactcctggtcgcgtctacgatatgctcaggcgtcgcgcgctgcggccggactacatcaagatgtttgtcctggacgaggcggacgagatgctgtcccgcggtttcaaggaccagatttacgacatcttccagctccttccctccaaggtccaggtgggcctcttctccgccacaatgccgcccgaggcgctggagatcacccgcaagttcatgaacaagccggtgcgcattctcgtcaagcgagacgagctgacgctggagggtatcaagcagttttacgtgaacgtggaacgagaggactggaaactggacacgctgtgcgacctgtacgagacgctggccatcacgcagagcgtcatcttttgcaacacccggcgcaaggtggactggctcaccgacaagatgaggagccgcgaccacaccgtgtctgcgacgcacggcgacatggaccagaacacccgcgacatcatcatgcgcgagttccggtcgggctcgtcccgcgtgctcatcaccaccgacttgctcgcgcgcggcatcgacgtccagcaggtgtcgctggtgatcaactacgaccttccgacgcagccggagaattatctgcatcgaattggtcgcagcggtcggtttgggcggaagggcgtggccatcaactttatggtgagagaggacgagaggatgcttcatgacatccagaagttttacaacactgtcattgaggagctgccaaataacgttgcggacctcatctaa

SEQ ID NO: 443 - protein, 411 aa, Selaginella moellendorffii
MAGLAPETSQFDPRQYDQKMEFALEGDDVISSWDEVNETFDSMGLHENLLRGIYAYGFEKPSTIQQRGIVPFCKGIDVIQQAQSGTGKTATFCSGILQQLDYNNVECQALVLAPTRELAQQIEKVMRALGDYLQVKVHACVGGTDVRQDQRILQAGVHVVVGTPGRVYDMLRRRALRPDYIKMFVLDEADEMLSRGFKDQIYDIFQLLPSKVQVGLFSATMPPEALEITRKFMNKPVRILVKRDELTLEGIKQFYVNVEREDWKLDTLCDLYETLAITQSVIFCNTRRKVDWLTDKMRSRDHTVSATHGDMDQNTRDIIMREFRSGSSRVLITTDLLARGIDVQQVSLVINYDLPTQPENYLHRIGRSGRFGRKGVAINFMVREDERMLHDIQKFYNTVIEELPNNVADLI

SEQ ID NO: 444 - DNA, 1395 bp, Selaginella moellendorffii
aaattacatcgcgcagtcatggcaggaatggcaccggagggctcgcaattcgatccccgtcagttcgatcagaaaatggaattcgccctcgagaccggcgaggaggccctctcgacctgggaggaggttaacgagacattcgattcgatgggtctccacgagaatctcctgcgagggatctatgcctacggttttgagaagccatcggcgatccagcagcgaggaatcgtcccgttttgccggggcctcgacgtgatccagcaagcccagtcggggaccggcaagacggctacgttttgctcgggcattctccagcagcttgacggacacctgaacgagtgccaggcgctcgtcctcgctcctacccgcgagctcgcccagcagatcgagaaggtgatgcgagcgctcggggattacttgcaaaccaaagttcacgcttgcgtcggcggcacggacgtccgccaggaccagaggatctgccaggcgggtgttcacgtcgtggttggaactcctggccgtgtctacgatatgctccgccgccgggccctccgctccgagcacatcaggatgttcgtcctggacgaggcggacgagatgctctcccgtggattcaaagaccaaatctatgatatcttccagctcctgcccgccaaggtccaggtgggcctcttctccgccaccatgccgcccgaggcgctggagatcacccgcaagttcatgagcaacccggtccggatcctcgtcaagcgcgacgagctgacgctggagggtatcaagcagttctacgtgaacgtggagcgcgaggactggaaactggacacgctgtgcgacctgtacgagacgctggccatcacgcagagcgtcatcttttgcaacacccgtcgcaaggtggactggctcacggacaagctgcggagccgcgaccacacggtgtcggcgacgcacggcgacatggatcaaaacacccgcgacatcatcatgcgcgagttccggtcgggatcgtcgcgagttctcatcaccaccgacttgctcgcgcgcgggatcgacgtccagcaggtgtcgctggtgatcaactttgatcttcccacgcagccggagaactacctgcatcgaatcgggcgcagcggtcggtttgggcgcaagggagtggcgatcaacttcttgaccaaggacgacgagaagatgctcttcgacatccagaagttctacaacaccgtcatcgaggaactgccgagcaacgttgcggacctcatctgagcagcgtgagtttttgctttattcgtctatttcttcttttttgttttggcctctaggctgctgtgcggaagttttgttttcgctctctcttttcgtttttgtacttttagttcggcaaaggaatcatgaattcacttg

SEQ ID NO: 445 - protein, 412 aa, Selaginella moellendorffii
MAGMAPEGSQFDPRQFDQKMEFALETGEEALSTWEEVNETFDSMGLHENLLRGIYAYGFEKPSAIQQRGIVPFCRGLDVIQQAQSGTGKTATFCSGILQQLDGHLNECQALVLAPTRELAQQIEKVMRALGDYLQTKVHACVGGTDVRQDQRICQAGVHVVVGTPGRVYDMLRRRALRSEHIRMFVLDEADEMLSRGFKDQIYDIFQLLPAKVQVGLFSATMPPEALEITRKFMSNPVRILVKRDELTLEGIKQFYVNVEREDWKLDTLCDLYETLAITQSVIFCNTRRKVDWLTDKLRSRDHTVSATHGDMDQNTRDIIMREFRSGSSRVLITTDLLARGIDVQQVSLVINFDLPTQPENYLHRIGRSGRFGRKGVAINFLTKDDEKMLFDIQKFYNTVIEELPSNVADLI

SEQ ID NO: 446 - DNA, 1921 bp, Sorghum propinquum
gcacgaggtccacaccgcaggcacagcgcgcctcccccttaaaagccgcctctcgccgccgcccgcaaaccctcgtttttctctctcctgcgctgcgccgtccctcagcctcacctccgccgccgaatccgagactccgatctcgggttcaccgcagcgcacagagcacccccaccgactgactcccggcccgatccgcgctctcttctccgtcgcttcagtcatggcaggaatggcacctgagggttctcagttcgatgctaagcactatgattctaaaatgcaggagctgctgagcactggtgagactgaggagttcttcacttcatatgatgaagtttttgagagttttgatgacatgggtctccaagagaatcttctgagaggcatttatgcttatggttttgagaagccttctgcaattcagcagagaggaattgttcccttctgcaaggggcttgatgtcattcagcaagcacaatctggtacaggaaaaacagcaactttctgttctgggatcttgcagcagcttgattatggcctggtggaatgccaggccttggtccttgctcccacccgtgagcttgcacagcaaattgagaaagtcatgcgcgcacttggtgactacctgggtgttaaggtccatgcatgtgtgggaggaacatctgtccgtgaggatcaaaggattcttgccagtggtgtgcatgttgttgttggtacacctggtcgtgtttttgacatgctgcgtaggcagtccctccgccctgataacatcaagatgtttgtgcttgatgaagctgatgaaatgctttctcgtggtttcaaggatcagatttacgacatcttccaacttcttccagccaagattcaggttggagtcttctctgctaccatgccccctgaggcccttgagatcacccgcaagttcatgaacaagcctgtcagaatccttgtgaagagagatgagctgactcttgagggtatcaagcagttctatgtgaacgtggagaaggaagactggaagctggacacactgtgtgacctgtacgagaccctggccatcacccagagtgtcatctttgtcaacacccgccgcaaggtggactggctcactgacaagatgaggagcagggaccacactgtctctgccactcacggtgacatggaccagaacactagagacatcatcatgagggagttccggtctggttcctcgcgtgtgctcatcaccaccgacctgcttgctcgtggtattgatgttcagcaggtgtccctggtcatcaactatgatcttcccacccagccagagaactacctgcatcgcattggtcgtagtggtcgtttcggtaggaagggtgttgccatcaactttgtgacccgcgacgacgagcggatgctgtttgacatccagaagttctacaatgtggtgattgaggagctgcctgccaatgttgctgaccttctgtgatcattttgaagaaaaactgaacaaaaaaaagggaggtgaggggaactgataaggcttggttttgtcgaaatatcgcgggggaggaagtgatatggtcggtggggtttctatgttaaagtcgtggtcatggacaatttgtggtttttctttatgccatgttttgggaatttttgtagctgcctaggccttgtggtatgtgctgctgtgggggttcattagtatcaagaggaagacgctgctggcgctggagtgtttttctctttattagtactttgtttaaaactatgtatgaccgaatgatggtatttatttgtgtcatccttgactcttattctgctgcaaccagttgtatcgtgccatgtgtttgcagcacttgtttttgctgctctgagtaaaacctttttactcggttgagcttgtcaactgttggtgcacggcctacggtaatgattt

SEQ ID NO: 447 - protein, 414 aa, Sorghum propinquum; identical to SEQ ID NO: 437

SEQ ID NO: 448 - DNA, 1656 bp, Solanum tuberosum
aaaacacacaaacacaacagtctcatctttctaatctattcctctttcctgaactcctgcggcgtagatccgaggagtttcagacagtctttacaaaccctaacccccaatcgcttttacccacttctcctcctactctttactctttattcctcagatctttaactcatctttatcagtcatggctggcttggcaccggaaggttctcaatttgatgctcgtcaatttgatgctaaaatgaccgagctgcttgggactgaacagcaggagttcttcacatcatatgatgaggttcatgacagttttgatgccatgggtttgcaagaaaaccttcttaggggaatctatgcctatggttttgagaagccatctgctatccagcaaaggggtattgttcctttttgcaagggtcttgatgtgatccaacaggcacaatctggtacaggaaagactgcaactttctgctctgggattctccagcagcttgattacagcttagtcgaatgtcaggctctggttctggctccaacccgtgagcttgcccaacagattgagaaggttatgcgagcacttggtgactatcttggtgtgaaggttcatgcctgtgtaggaggtaccagtgtccgtgaggatcagcgtatccttcaaagtggtgttcatgtggttgttggtactcctggtcgtgtatttgacatgttgcgcaggcagtctcttcgccccgaccacatcaagatgtttgttctggatgaagctgatgaaatgctctcaagaggtttcaaggatcagatttatgatattttccaattgctgccaccaaagattcaagttggtgttttctctgccacaatgccaccagaggcccttgaaattactaggaagttcatgaacaagcctgtgaggatccttgtgaagcgtgatgagctcactcttgaaggtatcaagcaattttatgtcaatgttgacaaggaagagtggaagcttgaaactctttgcgatctttacgagaccttagccatcacccagagtgtgatctttgtgaacaccaggcgtaaggttgattggctcactgataagatgcgcagccgtgatcacacagtatctgccactcatggagacatggaccagaacaccagagatatcattatgcgagagttccgatctgggtcatctcgtgtgcttatcactaccgatcttctggcacgtggtattgatgtgcagcaagtatcccttgtgattaactatgaccttcctactcagccagaaaactacttgcatcgtattggtcgtagtggacgatttggaaggaagggtgtagctatcaattttgtcacaaaggatgatgaaaggatgctttttgacattcagaagttttacaatgttgtagtggaggagctaccagccaatgtggccgatcttctttgaggtggtggttttggttgtctgagctgaattcttccttatattaagtaatttaatattttattcttaggttagttagaaccgcactggactaaaagttggaaactgcagtttctgtgattcgtcgtacttttccaattttgttggttttgtctttttgtattgcaagtccacaacaacttcaggttttggatgtctttgaatttttaagtatatttgatttaaacttttggcct

SEQ ID NO: 449 - protein, 413 aa, Solanum tuberosum
MAGLAPEGSQFDARQFDAKMTELLGTEQQEFFTSYDEVHDSFDAMGLQENLLRGIYAYGFEKPSAIQQRGIVPFCKGLDVIQQAQSGTGKTATFCSGILQQLDYSLVECQALVLAPTRELAQQIEKVMRALGDYLGVKVHACVGGTSVREDQRILQSGVHVVVGTPGRVFDMLRRQSLRPDHIKMFVLDEADEMLSRGFKDQIYDIFQLLPPKIQVGVFSATMPPEALEITRKFMNKPVRILVKRDELTLEGIKQFYVNVDKEEWKLETLCDLYETLAITQSVIFVNTRRKVDWLTDKMRSRDHTVSATHGDMDQNTRDIIMREFRSGSSRVLITTDLLARGIDVQQVSLVINYDLPTQPENYLHRIGRSGRFGRKGVAINFVTKDDERMLFDIQKFYNVVVEELPANVADLL

SEQ ID NO: 450 - DNA, 1822 bp, Triticum aestivum
tcatcgctgtctggaacagcgttgactcgagaaccgctctgtttttctctctcctgccaatcccctcatcgcctccgctcccacgccgccgaatccgagacctgatctcggattcaccgcagcgacgcgaccaaaccctcaggcgatccccggcacctcctccccgacgcttcagccatggcaggaatggcaccggaaggttcccagtttgacgctaagaactatgattctaagatgcaggagctgctgagccaaggtgagactgaggagttcttcacctcctatgatgaagttcatgagagctttgatgacatgggtctccaagagaacctcctcagaggaatttatgcttatggttttgagaagccttctgccatccagcaaaggggaatcgttcctttctgcaaggggcttgatgttatccagcaagcacaatctggaacaggaaagactgctactttctgttctggaatccttcaacagcttgactatggtttggttgagtgccaggccttggtccttgctcccacacgtgagcttgcacagcaaattgagaaggtcatgcgtgcacttggtgactacttgggtgtgaaggttcatgcatgtgttggaggaacctcagttcgtgaggaccaaaggattcttgcaagtggagtgcatgtcgttgttggtactcctggtcgtgtgtttgacatgctccgcaggcagtctctgcgccctgacaacatcaagatgtttgtcctcgatgaagctgatgagatgctttcccgtggtttcaaggatcagatttatgacatcttccagcttctcccagggaagattcaagttggtgtcttctctgccaccatgccccctgaagcccttgagattacccgcaagttcatgaacaagccagtgaggatccttgtcaagagggatgagctcacccttgagggtatcaagcagttctatgtcaatgtggagaaggaagagtggaagctcgacacactgtgtgacctgtacgagactcttgccatcacccagagtgtcatctttgtgaacacccgccgcaaggtggactggctcaccgacaagatgaggggcagggaccacaccgtctccgccactcacggagacatggaccagaacactagggacatcatcatgagggagttcagatcaggttcttcacgtgtgctcatcaccactgacctgcttgctcgtggtattgatgtccagcaagtgtccctggtcatcaactatgacctcccgacccagccagagaactacctgcatcgcatcggtcgtagtggtcggttcgggaggaagggtgtggccatcaactttgtgacccgtgaagatgagaggatgctgtttgacatccagaagttctacaacgtggtgattgaagagctcccagccaacgttgccgaccttctgtgatcgggcgggctgtcgagaacatatggtaagggggtcctgacagggctttgtttttgttgaagtatcaccaaactttcttgtctgtgggtgggggggttcaagtgataaatggtctgctggggttctactttaaagtcgtggtcgtggacaatttgggatttattaagccatgttttgggaatttttgtagttgctaggctgtggttctatgtgctgaggagggaggcgctgctgctcatgttgctgttgctggagtcctcactttatttgttaagactatgtaatgaccgaatgatgttatttgtttgtgtcatccttgactctttacctaccgcatgtaatcctgcaatcggtactagtaatgttatggttattaaaaactgtttactctttttttagc

SEQ ID NO: 451 - protein, 414 aa, Triticum aestivum
MAGMAPEGSQFDAKNYDSKMQELLSQGETEEFFTSYDEVHESFDDMGLQENLLRGIYAYGFEKPSAIQQRGIVPFCKGLDVIQQAQSGTGKTATFCSGILQQLDYGLVECQALVLAPTRELAQQIEKVMRALGDYLGVKVHACVGGTSVREDQRILASGVHVVVGTPGRVFDMLRRQSLRPDNIKMFVLDEADEMLSRGFKDQIYDIFQLLPGKIQVGVFSATMPPEALEITRKFMNKPVRILVKRDELTLEGIKQFYVNVEKEEWKLDTLCDLYETLAITQSVIFVNTRRKVDWLTDKMRGRDHTVSATHGDMDQNTRDIIMREFRSGSSRVLITTDLLARGIDVQQVSLVINYDLPTQPENYLHRIGRSGRFGRKGVAINFVTREDERMLFDIQKFYNVVIEELPANVADLL

SEQ ID NO: 452 - DNA, 1685 bp, Trifolium pratense
acaaaaaaaaaaaaacgctcttcgctctctctctttcctcaactccgcggcttagatctgaggagttttggaaaccctaataaccattctccgatcaacaacttcatcgcactttttctctccgatcaataactctttcatctccttaagcaatcatggcaggcgttgcaccagagggttctcagtttgatgctaagcaatttgattccaaaatgaatgagttgctcacaactgatgcacaggacttcttcacatcttatgatgaggtttatgatagttttgatgctatgggcttgcaagagaatcttcttagaggcatttatgcatatggttttgagaagccatcagcaattcagcaacgtggaatagttccattttgcaagggacttgatgttatacaacaggctcagtctggaacaggaaagacagcaaccttctgctctgggattctgcagcaacttgactacagtttgacagaatgccaagccttggtcttggcaccaactcgtgagcttgctcagcagattgagaaggtcatgcgtgcacttggagattatctaggtgtgaaggtgcatgcctgtgtgggaggaaccagtgtgcgtgaagaccaacgcattctgtcaagtggtgttcatgtcgttgttggtacccctggtcgtgtatttgacatgctgcgcagacagtcgcttcgacctgatgtcatcaaaatgtttgtattggatgaagctgatgaaatgctttctcgtggttttaaggatcagatctatgatatattccagctgttgccatctaagattcaagtgggagttttctctgctaccatgcctcctgaggctcttgagatcacaaggaagtttatgaacaaacctgtgagaattcttgtgaagcgtgatgagctcacctcggagggtattaaacaattttatgtcaatgttgataaagaggaatggaagctcgacacactctgtgatctttatgagacattggcaatcactcagagtgtcatttttgtcaacaccagacggaaggttgactggctgactgacaagatgagaagccgtgaccacactgtctcagcaacacacggagacatggaccagaatactagagacattattatgcgtgaattccgttctggatcttcccgtgttttaattactactgatcttcttgcacgtggtattgatgtgcagcaagtgtctttagttataaattatgatctccccacacagcctgaaaactacctccatcgtattggtcgtagtggaaggttcggtaggaaaggtgttgccattaactttgtgacaacagatgatgaaagaatgctgagtgacatccagaagttctacaatgtgataattgaggagctgccttccaatgttgccgaacttctgtgatgagattttttcttcgatcatactagagggaagttggtttctgaggtaagtggtatgtaatgtttcccccctttttggcccatttgttgtatttctgttttcaaaccttgtttgacctttttaataggtgtagtaatttattttacattttcagtctgaatatcctaagtgataagtactcgcaacatggaatccattattattgtctgaattggtgtgttgatcgtttttgcacctttcctaatgagcaagttttagatttaagtttttagttattattctgattct

SEQ ID NO: 453 - protein, 413 aa, Trifolium pratense
MAGVAPEGSQFDAKQFDSKMNELLTTDAQDFFTSYDEVYDSFDAMGLQENLLRGIYAYGFEKPSAIQQRGIVPFCKGLDVIQQAQSGTGKTATFCSGILQQLDYSLTECQALVLAPTRELAQQIEKVMRALGDYLGVKVHACVGGTSVREDQRILSSGVHVVVGTPGRVFDMLRRQSLRPDVIKMFVLDEADEMLSRGFKDQIYDIFQLLPSKIQVGVFSATMPPEALEITRKFMNKPVRILVKRDELTSEGIKQFYVNVDKEEWKLDTLCDLYETLAITQSVIFVNTRRKVDWLTDKMRSRDHTVSATHGDMDQNTRDIIMREFRSGSSRVLITTDLLARGIDVQQVSLVINYDLPTQPENYLHRIGRSGRFGRKGVAINFVTTDDERMLSDIQKFYNVIIEELPSNVAELL

SEQ ID NO: 454 - DNA, 1110 bp, Thalassiosira pseudonana
atggagatccccgaagaactcttgagggggatctacgcctatggatttgagaagcctagtgctattcagcagagggctattaaacctaccatgttgggaagggatctgattgctcaggctcagtctggaacgggtaaaaccgccaccttcgccatcggaaccctcgccaaacttgaccccaaactccgcgaatgccaatccctcatcctcgcacccactcgtgagctcgcccaacaaatccaaaaggtcgttattgccctcggagactacatggaactccaagtccatgcctgcgtcggaggtaccgccgtccgtgatgacattcgtactcttcagggaggagtgcatgttgtggttggaactcctgggcgtgtttatgatatgattaacaggagggctttgaggttggatagcatcaggcagttctttttggatgaggctgatgagatgctttctcgtgggttcaaggatcagatttatgatatttttaagttccttcctgaatcggtgcaagtgtgccttttctcggctaccatgcccttggatgtgttggaggtcactcaacgtttcatgagggatcctgtcaggatcctcgtcaagaaggatgagttgacccttgagggtatcaagcaattctacattgctgtggagagggaggagtggaagctcgacactctttgtgatttgtacgagactctcaccatcacccaggccattatctactgcaacacccgtcgcaaggtcgattggctgcaggagcagatgcaagagcgtgacttcaccgtctcgtgcatgcatggagatatggaccagcgtgaacgtgatatcatcatgcgtgagttccgttctggatcgtcccgcgttctcatcaccaccgatcttttggcccgtggtattgatgtgcagcaggtttctcttgtgattaactttgacttgcccaccaaccgtgagaactacatccatcgtattggtcgatctggacgtttcgggcgtaagggtgtggctatcaacttcttgaccgaaggtgatgttcgttatctccgtgatattgagcagttctaccagactgagattactgagatgccaatgaacgttgctgatcttatctaa

SEQ ID NO: 455 - protein, 369 aa, Thalassiosira pseudonana
MEIPEELLRGIYAYGFEKPSAIQQRAIKPTMLGRDLIAQAQSGTGKTATFAIGTLAKLDPKLRECQSLILAPTRELAQQIQKVVIALGDYMELQVHACVGGTAVRDDIRTLQGGVHVVVGTPGRVYDMINRRALRLDSIRQFFLDEADEMLSRGFKDQIYDIFKFLPESVQVCLFSATMPLDVLEVTQRFMRDPVRILVKKDELTLEGIKQFYIAVEREEWKLDTLCDLYETLTITQAIIYCNTRRKVDWLQEQMQERDFTVSCMHGDMDQRERDIIMREFRSGSSRVLITTDLLARGIDVQQVSLVINFDLPTNRENYIHRIGRSGRFGRKGVAINFLTEGDVRYLRDIEQFYQTEITEMPMNVADLI

SEQ ID NO: 456 - DNA, 1720 bp, Volvox carterii
cctgcgataaagcgggccataactgctcttataagattttcgttgccttcgttttacgggcctgagagccctatttgagcaaacctgcaagcatggctgcccctcctgttgaacaacgtactggcttcgatgaccgcgccttcgactcgaagatgcaggccttcctcacgaacaaccaggataacttttacaccgattgggaggagagctttgagagcttcgaccagatgaacctgcacgagaacttgctgcgtggcatctacgcatacggttttgagaagccctcggccattcaggcaaagggtatcgtacccttcaccaagggcctggatgtgattcagcaggctcagtctggcacgggcaagacggccaccttctgcgccggtattcttaacaacctggactacaacctgaatgagtgccaggcgctggttctggctccaacccgcgagctggctcagcagattgagaaggtcatgcgcgctctgggcgacttcctgcaggtcaagtgccacgcctgcgtcggtggcaccagcgtgcgtgaggacgcgcgcattttgggtgcaggtgtgcaggttgtggtgggcacccccggtcgcgtgttcgacatgctgcgccgtcggtacctgcgcgcggacaacatcaagatgttcgtactggatgaggccgatgagatgttgtctcgcggcttcaaggaccagatctacgacatcttccagctgctgccgcctaagctgcaggtgggcgtcttctcagccactctgccccctgaggcgctggagatcacccgcaagttcatgaacaagccggtgcgcattctggtcaagcgtgatgagctgaccctggagggtatcaagcagttctatgtggatgtggacaaggaggaatggaagctggacactctctgcgatctgtacgagacgctggccattacgcagtccgtcatcttcgcgaacacgcgccgcaaggtcgactggctaacggagaagatgcgcgagcgcgatcataccgtatcggcaacgcacggtgacatggagcagaatgcccgcgatgtgatcatgcgggagttccgttccggctcatcgcgtgtgctgatcaccacggatctgctggctcgcggtatcgacgtgcagcaggtttctctggtcatcaactacgacctgccaacgcagccggagaactacctgcaccgcattggtcgctcgggccgctttggtcgcaagggtgtggcgattaacttcatcgtcaaggaggacgagcgtatgctccaggacatccagcggttctacaacaccgtggtggaggagctgccttcgaacgtcgctgacctcatctgaagttccatatgcgcaaaaaaagcttgcttacattgtcaaaaaagcaaagcctgcaggatgcatcaggcgagaggcaagagggcagcccctacgcttctgctccgctactgtttgcgcagagtgcgcttcgatagtgctgtgcatcgcagtactgcatgctaaggctgcgccgtggcgcgttactccggcgaggttgaaaacttgcaaatggggcagctaggaaaacagcttatggtgttcttgttggcggcaggattcatgatggtatgattgcccaggttctgcagttccggacgtccgctgcccgcttaccacaaatgtaagaaacactttagtctccttttctgtggttacgggggtggtgtgcaaacatgaacgaaagg

SEQ ID NO: 457 - protein, 414 aa, Volvox carterii
MAAPPVEQRTGFDDRAFDSKMQAFLTNNQDNFYTDWEESFESFDQMNLHENLLRGIYAYGFEKPSAIQAKGIVPFTKGLDVIQQAQSGTGKTATFCAGILNNLDYNLNECQALVLAPTRELAQQIEKVMRALGDFLQVKCHACVGGTSVREDARILGAGVQVVVGTPGRVFDMLRRRYLRADNIKMFVLDEADEMLSRGFKDQIYDIFQLLPPKLQVGVFSATLPPEALEITRKFMNKPVRILVKRDELTLEGIKQFYVDVDKEEWKLDTLCDLYETLAITQSVIFANTRRKVDWLTEKMRERDHTVSATHGDMEQNARDVIMREFRSGSSRVLITTDLLARGIDVQQVSLVINYDLPTQPENYLHRIGRSGRFGRKGVAINFIVKEDERMLQDIQRFYNTVVEELPSNVADLI

SEQ ID NO: 458 - DNA, 1698 bp, Vitis riparia
cacaactccacggcgcagatccgaggagttgggaaaccctagctgctctctctttctctcgctaaagctccagctctcaatatctctcgtaatcaccatcgtcagttatggcaggtcaagcaccagaaggttcacaattcgatgctcgtcaatttgattccaaaatgaatgacttgctctcagctgatggagaagatttcttcacatcatatgatgaggtttatgacacttttgattctatgggattagtagagaaccttttgaggggtatctatgcatatggttttgagaagccttctgcgatccaacaaagaggaattgttccattctgcaaggggctcgatgtgatccaacaggcacaatctggaactgggaaaactgcaactttctgctctggaatcttgcagcaacttgattatagtctagtccaatgccaggcattggtattggcacccactcgagaacttgcacagcagattgagaaggttatgcgagcacttggtgattatctcggtgtgagggttcatgcttgtgtgggtgggacaagtgttcgtgaggatcagcgcattcttcaaactggtgttcatgttgttgttggtactcctggtcgtgtgtttgacatgttgcggagacagtcacttcgcccagattacattaagatgtttgtattggatgaggctgatgaaatgctttcacgaggtttcaaggatcagatctatgacattttccagctgctgccatctaaagtccaggttggagtgttctctgccacaatgccccctgaggcccttgagatcactcgaaagttcatgaacaaacctgtgagaatcctggtaaagcgtgatgaactcacccttgaaggtatcaaacaattccatgttaatgtggataaggaagagtggaagcttgagacactgtgcgatctctacgaaaccctggccatcactcagagtgtcattttcgtgaacacaaggcgcaaggtggactggcttactgacaagatgcgaagccgtgatcacacagtatctgctacccatggagacatggaccagaacactagggatataatcatgcgcgagtttcgctccggctcctcccgtgttcttataaccactgatctcttagctcgtggtatcgatgttcagcaagtctctcttgttattaactatgatctgccaactcaaccagaaaattacctccatcgaataggtcgaagtggacgatttggaagaaaaggtgttgccatcaactttgttaccagggatgatgagagaatgctgtttgacattcagaggttctataatgtggtcattgaggagctgccatcaaatgttgctgatctcctctaaagaggtttttttgggggttcctcgaggtaaggggtttcttatttcaaaagtactatttaacgttggattttttttttttttttaatgtctagtgtcttaatttaatgtttccagacatatttgaccatataatgatatgggtcctgcacatttgcaataggataattgtcatgttgcctatttcagtgtgataggcatttattattgcaagttttggtgcaggtaggttttgtatcgtatgctcttattcttttccatccttgtattgttcaaaaagctagtagtttggattgtttattatgttggatcttgcttttgagttttcaatggggggagatgttttttaatt

SEQ ID NO: 459 - protein, 413 aa, Vitis riparia
MAGQAPEGSQFDARQFDSKMNDLLSADGEDFFTSYDEVYDTFDSMGLVENLLRGIYAYGFEKPSAIQQRGIVPFCKGLDVIQQAQSGTGKTATFCSGILQQLDYSLVQCQALVLAPTRELAQQIEKVMRALGDYLGVRVHACVGGTSVREDQRILQTGVHVVVGTPGRVFDMLRRQSLRPDYIKMFVLDEADEMLSRGFKDQIYDIFQLLPSKVQVGVFSATMPPEALEITRKFMNKPVRILVKRDELTLEGIKQFHVNVDKEEWKLETLCDLYETLAITQSVIFVNTRRKVDWLTDKMRSRDHTVSATHGDMDQNTRDIIMREFRSGSSRVLITTDLLARGIDVQQVSLVINYDLPTQPENYLHRIGRSGRFGRKGVAINFVTRDDERMLFDIQRFYNVVIEELPSNVADLL

SEQ ID NO: 460 - DNA, 1508 bp, Vitis shuttleworthii
ctctctctttctctcgctaaagctccagctctcaatatctctcgtaatcaccatcgtcagttatggcaggtcaagcaccagaaggttcacaattcgatgctcgtcaatttgattccaaaatgaatgacttgctctcagctgatggagaagatttcttcacatcatatgatgaggtttatgatacttttgattctatgggattagtagagaaccttttgaggggtatctatgcatatggttttgagaagccttctgcgatccaacaaagaggaattgttccattctgcaaggggctcgatgtgatccaacaggcacaatctggaactgggaaaactgcaactttctgctctggaatcttgcagcaacttgattatagtctagtccaatgccaggcgttggtattggcacccactcgagaacttgcacagcagattgagaaggttatgcgagcacttggtgattatcttggtgtgagggttcatgcttgtgtgggtggaacaagtgttcgtgaggatcagcgcattcttcaaactggtgttcatgttgttgttggtactcctggtcgtgtgtttgacatgttgcggagacagtcacttcgcccagattacattaagatgtttgtattggatgaggctgatgaaatgctttcacgaggtttcaaggatcagatctatgacattttccagctgctgccatctaaagtccaggttggagtgttctctgccacaatgccccctgaggcccttgagatcactcgaaagttcatgaacaaacctgtgagaatcctggtaaagcgtgatgaactcacccttgaaggtatcaaacaattccatgttaatgtggataaggaagagtggaagcttgagacactgtgcgatctctacgaaaccctggccatcactcagagtgtcattttcgtgaacacaaggcgcaaggtggactggcttactgacaagatgcgaagccgtgatcacacagtatctgctacccatggagacatggaccagaacactagggatataatcatgcgcgagtttcgctccggctcctcccgtgttcttataaccactgatctcttagctcgtggtatcgatgttcagcaagtctctcttgttattaactatgatctgccaactcaaccagaaaattacctccatcgaataggtcgaagtggacgatttggaagaaaaggtgttgccatcaactttgttaccagggatgatgagagaatgctgtttgacattcagaggttctataatgtggtcattgaggagctgccatcaaatgttgctgatctcctctaaagaggattttttgggggttcctcgaggtaaggggtttcttatttcaaaagtactatttaacgttggattttttttttttaatgtctagtgtcttaatttaatgtttccagacatatttgaccatataatgatatgggtcctgcacatttgcgataggataattgtcatgttgcctatttcagtgtgatgggcatttattattgc

SEQ ID NO: 461 - protein, 413 aa, Vitis shuttleworthii; identical to SEQ ID NO: 459

SEQ ID NO: 462 - DNA, 4113 bp, Vitis vinifera
cttaactcctcttcactgcgtgcggatccgaggagtttggggaaaccctaatcctaaccctagccctaatccacctcttgctcttcgctttcaggtgctcactactttacttctctatttgtttatagcttagctaccagatcttactctcgtattctgcatgtttattttttactttttctccacatctcttactgattttttttattttttttaatataaaattttctgaatctgtcttgaatggcgccatattttctgtgattgaatgattggttgctatatttattgctaatgttccgttgattaaagttttgtaatgcccaaatttttagggagaaaattggttccttttattcgcggtatgccgaaggcctctggaaaattatgtttgaatatggttgatatttgctttatttgaacgcttataccatatatttatcagtagttttccatacattgaagctttactgtagaatttatatatttataagggttaatttcactcatctttcctgaggttttggttttggttaaatagacctaacacccattggtttgaaatttcattaggtacatcccccatccttcttatttgttgttttcactaacctcccctctcactcaaaataagaaaggttttggcgaaattttaaaccaatgggggctagatgtacttggctaaaaccttgagaggggtgagtgaaatcaaccctatttatgatgtttaggaatgcggggaaagtctctggaaaattttgtaatctctattgaatttgcttactatttgctttattgaatgcttatgtcatgtttatcattaatatcccaaagaatttaaatttttcctaagttattccatatatattgtgaagctagttggtttctgatgtttaccaatgtggcaaaagcgtttggattattttacgtggaaaattttaagcattatcagtggttggtttgtaggttgtgattgacttgtgaggaaaccctaatgcttatattcgagattttttttttcaaagttatcgagtaggaatttaattggttggcaattgtataatgcgaattgggattttttttattttatattattacataagataggaggtgtaagtatttattaaattcttagtccgtgggtttatatcaacttattaggaatttgtagtttacaaattagtttctaatgtttaccaataagccaacagtgtctgaattgatggaacacaataaatgttgaaagtcattagtttttaggttaagattgacttatgaggaaacccttatgattatatttgagatttgatttaattattttctttttttaaagttagttgagcaggaatctgatccaatctatgacgtgaattaagaatttgtatattgttgtcacattagataatatgtgtaaatatttgttaaattattactttataggtcagtatcgacctacgaggaagctatggtgatttttttttttaaattaagatttttttacattattgttacatgagacaatatgtgtaagtatttattaaattattagtttattatattatgagcaaactatgttgcttattttttaagtcaatttatttttcagttagtcaagtagtagtagaatgaaaggcatggaaatttattattggttttcctttggattcaatagtttgtcatggaggtggcttgttctagtctttaatcgagtatataatgtaaaagctttgacatttcttttctagtattattgttaaagatgacacatttgtaaatatttatcaattactagtttatagtttcatatagacttgtaaggttaacaataatgcttattttttaaattcagcatatttctttttgtgtttagtaatttgattgtttgtgtcatgtgacatgttgacctatcagtttttccttttgtgtgatagtttattaaggttgtgggttgttttcggtctttaagatccaaaatgttttatgaatacatactttctattgatagttatgaaagaatgtataatgaatgcacaagagtgtgtatgtgtcctttcatgaattcatcacaagtgttcaggaataaatcaattttgtaattaaatttggtgttgtttctattcatgggttgatttcattaccactcttcaaaatatgtttataactcatgtgcttgctatagtcatggctggcttggcaccggaaggatcacaatttgatgctcgtcaatatgatagcaaaatgaatgagttacttgggactgatggacaagatttcttcacatcatatgatgaggtctatgaaagttttgatgcaatggggttgcaagagaatctcctgagaggcatttatgcatacggttttgagaagccctctgcaattcagcaaagaggtattgttcccttcatcaaggggcttgatgtaattcagcaagcacagtctggaactggaaaaacagcaactttctgctctggaattttgcagcagcttgattatggcttagttgaatgccaggcattggtccttgcacccactcgggaacttgcccaacaaattgaaaaggttatgcgagcactaggtgattatcttggtgtgaaggttcatgcttgtgttggtgggaccagtgtccgtgaagaccagcgcattctctcaagtggggttcatgtcgttgtgggtactcctggtagggtttttgacatgttgcgcaggcaatcacttcgtcctgattacattaagatgtttgtgttagatgaagcagatgaaatgctttcacgaggtttcaaggatcagatctatgatattttccagttgctgccatcaaagattcaggttggggtgttctctgccacgatgccacctgaggcccttgagatcacaaggaaattcatgaataaacctgtgaggattctggtgaaacgtgatgagctcacccttgagggtatcaaacagttctatgtcaatgttgataaagaggaatggaagcttgagacactttgtgatctctatgagacgctggcgatcacccagagcgtcatctttgtgaacacccggcgcaaggttgactggctgacggacaagatgcgcagccgtgaccacacagtctctgccacccacggagacatggatcaaaacacaagagacatcatcatgcgtgaattccgatctggttcctctcgtgtgctcatcactactgatctattggcccgtggtattgatgtccagcaagtctctcttgtgataaactatgacctcccaacacagccagaaaactacctccatcgaattgggcgtagtggacgatttgggaggaagggggtggcaatcaactttgtgaccaaggatgatgagaggatgctttttgatatccaaaggttttataatgtggtggttgaggagctgccatcaaatgttgctgatctcctgtgatgaagtttttgctcatggaggtaaatgacttttatttgaaaagtcatatttattatgttcgttctcataggtctggcatcttaatttatcatggaatgaacttgccgtacaattgggagatacaggtcctgcgcatttcacatcgggacacatccattgctcattttgggtatattggcaatccgttgttgcaacttttgttgcctgagttttcttttgtattttaagttttttaagtttccttgaacaatttgagaaattggatctagtttggattggattcattttgttctattttagttttttgtgtgtgggaggagaagctcaatatgattagaaaatggttttttgagtttcaggaggctggacttgcaccattcttggttcttcacttcaaacctttctttgagctactttattcatttataagcgacataacaattgttttccccctttccttttccttttttgaagtctgaactacagattcaattttcattcttatcaaacagaaccttaaccagaggcttcttgtttctctatggtgtggaacatgaagattagcccacacctcactcttttcttttctttctttttatttttttccctgttctcccaatattgttttataattatcctacctgtgtgctttgtttgggaggaataaagttgctcaacttgtattacaaa

SEQ ID NO: 463 - protein, 413 aa, Vitis vinifera
MAGLAPEGSQFDARQYDSKMNELLGTDGQDFFTSYDEVYESFDAMGLQENLLRGIYAYGFEKPSAIQQRGIVPFIKGLDVIQQAQSGTGKTATFCSGILQQLDYGLVECQALVLAPTRELAQQIEKVMRALGDYLGVKVHACVGGTSVREDQRILSSGVHVVVGTPGRVFDMLRRQSLRPDYIKMFVLDEADEMLSRGFKDQIYDIFQLLPSKIQVGVFSATMPPEALEITRKFMNKPVRILVKRDELTLEGIKQFYVNVDKEEWKLETLCDLYETLAITQSVIFVNTRRKVDWLTDKMRSRDHTVSATHGDMDQNTRDIIMREFRSGSSRVLITTDLLARGIDVQQVSLVINYDLPTQPENYLHRIGRSGRFGRKGVAINFVTKDDERMLFDIQRFYNVVVEELPSNVADLL

SEQ ID NO: 464 - DNA, 1718 bp, Vitis vinifera
ctctcttcttctcacaactccacggcgcagatccgaggagttgggaaaccctagctgcgctctctttctctcgctaaagctccagttctcaatatctctcgtaatcaccatcgtcagttatggcaggtcaagcaccagaaggttcacaattcgatgctcgtcaatttgattccaaaatgaatgacttgctctcagctgatggagaagatttcttcacctcatatgatgaggtttatgacacttttgattctatgggattagtagagaaccttttgaggggtatctatgcatatggttttgagaagccttctgcgatccaacaaagaggaattgttccattctgcaaggggctcgatgtgatccaacaggcacaatctggaactgggaaaactgcaactttctgctctggaatcttgcagcaacttgattatagtctagtccaatgccaggcattggtattggcacccactcgagaacttgcacagcagattgagaaggttatgcgagcacttggtgattatctcggtgtgagggttcatgcttgtgtgggtggaacgagtgttcgtgaggatcagcgcattcttcaaactggtgttcatgttgttgttggtactcctggtcgtgtgtttgacatgttgcggagacagtcacttcgcccagattacattaagatgtttgtattggatgaggctgatgaaatgctttcacgaggtttcaaggatcagatctatgacattttccagctgctgccatctaaagtccaggttggagtgttctctgccacaatgccccctgaggcccttgagatcactcgaaagttcatgaacaaacctgtgagaatcctggtaaagcgtgatgaactcacccttgaaggtatcaaacaattccatgttaatgtggataaggaagagtggaagcttgagacactgtgtgatctctacgaaaccctggccatcactcagagtgtcattttcgtgaacacaaggcgcaaggtggactggcttactgacaagatgcgaagccgtgatcacacagtatctgctacccatggagacatggaccagaacactagggatataatcatgcgcgagtttcgctccggctcctcccgtgttcttataaccactgatctcttagctcgtggtattgatgttcagcaagtctctcttgttattaactatgatctgccaactcaaccagaaaattacctccatcgaataggtcgaagtggacgatttggaagaaaaggtgttgccatcaactttgttaccagggatgatgagagaatgctgtttgacattcagaggttctataatgtggtcattgaggagctgccatcaaatgttgctgatctcctctaaagaggtttttttgggggttcctcgaggtaaggggtttcttatttcaaaagtactatttaacgttggattttttttctttttttctttttctttttttaatgtctagtgtcttaatttaatgtttccagacatatttgaccatataatgatatgggtcctgcacatttgcgataggataattgtcatgttgcccatttcagtgtgatgggcatttattattgcaagttttggtgcaggtaggttttgtatcgtatgctcttattcttttccatccttgtattgttcaaaaagctagtagtttggattgtttattatgttggatcttgcttttgagttttcaatgaggagaaatatttt

SEQ ID NO: 465 - protein, 413 aa, Vitis vinifera; identical to SEQ ID NO: 459

SEQ ID NO: 466 - DNA, 1823 bp, Welwitschia mirabilis
ttttaaataaatacgcgtctttgctatctttctgcactcactcgttttcttactccaatcgttcttttcttcggcggcaggaagaaggaagaagaatccctttctctctcattcctttcgtcacttcactttaaacccgagcgcgttttctgcttctggtccgcgtttctttgcttccgcgtttttgcagatcggaaaaaggctttttttgagtgcgcgagaatggcgagcatggatcaggcggggaataacttcgacgcaaggagctatgacaagaacatgcaaaacgttcttggagaggaactctattcgacgtgggacgaagttcacgattcattcgattcaatgggtcttcacgagaatctgttaagaggaatctacgcatatggttttgaaaagccgtctgctattcagcaacgaggaattgttcctttctgtcgagggcttgacgttattcagcaagcacaatccggtacaggaaagactgcaactttttgttctggaattttgcagcagcttgattacggtcttcctgattgccaagctctggtattggcccctacccgtgagcttgctcagcaaatcgaaaaggttatgagggctcttggggattatcttcaagtgagggttcatgcttgtgttggaggaacaagcatcaaagaggacttgcgtattctccaatctggtgttcatgttgtcgtgggtacacctggtagggtttatgacatgcttcgtcgtcgtgcattgcgacctgattctatcaggatgtttgttctcgatgaggctgatgaaatgttgtcgagaggtttcaaagatcagatctatgatatctttcaacttcttccttcaagccttcaagtcggtgtattttcggctacaatgcctcctgaagccttggagataacacggaaattcatgaacaatccagtaaggattctagttaaaagagatgaattgaccttggaaggtatcaaacagttttatgtcaatgtggacaaagaagagtggaagcttgatacgctctgtgatttgtatgaaactcttgctatcactcagagtgtaatttttattaatacccgaagaaaggtggattggcttaccgatcagatgcgtgctcgcgaccatacagtctctgcaactcatggtgatatggaccagaacacgagagacattatcatgagagaattcaggacaggatcatcgagggttctgattaccaccgacctgttggctcggggtattgatgtgcagcaagtatcccttgtcatcaactatgacctgccaacacagcctgaaaattatcttcaccgtattgggcgtagtgggcgatttggtaggaagggtgtggcaatcaactttgttaccagggatgatgagagaatgcttcaggacatccagagattttacaatgtaacaattgaagaattgccatctaatgttgcggatttaatatagagtgaagctgaaatagcacctgtgtcctacagcgtgtgttatctttcatatttggactttctgtggattgttccatggctggggatttgcagaactggttggtataattggatcactctgtacggcgtgaatcttttgatgctcatgtttttatttttacctttacctttctgggtatttgatagtacggggagagctattgtaagctttgttctctcccttctgtgaggttctgatagatattattaaaattaagggactaaggataatgaggcttgtgccttggatgttcgttttattttataggcttgacatgttttggagaaaacaaatttgaatgttaattattttttattgccgttcttttt

SEQ ID NO: 467 - protein, 410 aa, Welwitschia mirabilis
MASMDQAGNNFDARSYDKNMQNVLGEELYSTWDEVHDSFDSMGLHENLLRGIYAYGFEKPSAIQQRGIVPFCRGLDVIQQAQSGTGKTATFCSGILQQLDYGLPDCQALVLAPTRELAQQIEKVMRALGDYLQVRVHACVGGTSIKEDLRILQSGVHVVVGTPGRVYDMLRRRALRPDSIRMFVLDEADEMLSRGFKDQIYDIFQLLPSSLQVGVFSATMPPEALEITRKFMNNPVRILVKRDELTLEGIKQFYVNVDKEEWKLDTLCDLYETLAITQSVIFINTRRKVDWLTDQMRARDHTVSATHGDMDQNTRDIIMREFRTGSSRVLITTDLLARGIDVQQVSLVINYDLPTQPENYLHRIGRSGRFGRKGVAINFVTRDDERMLQDIQRFYNVTIEELPSNVADLI

SEQ ID NO: 468 - DNA, 1697 bp, Zea mays
gaagcgaggaagaggaacgggtcgagccgcgccccgcctccgtcggaaccctttataaccgcctcccccaaaccctcccttccttcctttccccgctcttctcccacacaaacgccaccgccgcatcgaatccgagacgccgatctcggattcgccgtcaccacacgctgccctcgtcgcgctctcccgccgccgccgctcgtctcgtcagccatggcaggattggcaccagaagggtcgcaatttgatgacaagcagtatgacaagaaaatgcaggagatattaactgaagacttcttcacttcatatgatgatgtttgtgaaagttttgacagcatgggactgcaagagaaccttctgagaggcatctatgcctatggttttgagaagccatcggctattcagcaaaggggaatagttcccttctgcaaggggcttgacgtgattcagcaagctcagtctggaactggaaaaacagctaccttctgttctggaatcttgcagcaacttgattatggattggttgaatgccaggcattggttcttgctccaacccgtgagcttgctcagcaaattgagaaggttatgcgtgctcttggggactatttgggtgtcaaagtgcatgcctgtgttggtggaacatctgttcgtgaggaccaaaggattcttgccagtggtgtgcatgttgttgtgggcacaccaggacgtgtgtttgatatgttgcgcaggcagtctctccgtcccgacaacatcaagatgtttgtgttggatgaggctgatgagatgctctcccgtggattcaaggatcagatctatgatatcttccagcttcttccatccaagattcaggtcggtgtcttctcagctaccatgccccctgaggcccttgagatcacgcgcaagttcatgaacaaacctgtgaggattctcgtcaagagagatgagctcacccttgagggtatcaagcaattctatgtcaatatcgacaaggaagattggaagctcgacactctgtgtgacctgtatgagaccctggcaatcacccagagtgtcatctttgtgaacacacgccgcaaggtggactggctcacggacaagatgaggagcagggaccacaccgtgtcagctacacacggtgatatggaccagaacaccagggacatcatcatgagggagttcaggtccgggtcctctcgtgtgctcatcaccaccgacctgctcgcccgtggtatcgacgtccagcaggtctcacttgtcatcaactacgacctgccgacccagccagagaactacctccaccgcatcggccgtagtggtcggtttggaaggaagggtgttgccatcaacttcgtcacccgcgacgacgagcgaatgctgtttgacatccagaggttctacaacgtgaccgttgaggagctgccggccaatgtcgccgaccttctctagatagtatggctgctaaggtttctggataaaggagtttgtttttgttaaaatacgccaacttttctctgctttggatgagtggtaaggtccggggtctgttcgtattgtggcgaaggatgggttttaagtttattttgtcgtatgcaacgtttcggaatttttgtagcgagtaggctacgtgccgctcctgggctagctgggtgctgagacactactgaagtatttttaccttagctgttgggcttatgatt

SEQ ID NO: 469 - protein, 410 aa, Zea mays
MAGLAPEGSQFDDKQYDKKMQEILTEDFFTSYDDVCESFDSMGLQENLLRGIYAYGFEKPSAIQQRGIVPFCKGLDVIQQAQSGTGKTATFCSGILQQLDYGLVECQALVLAPTRELAQQIEKVMRALGDYLGVKVHACVGGTSVREDQRILASGVHVVVGTPGRVFDMLRRQSLRPDNIKMFVLDEADEMLSRGFKDQIYDIFQLLPSKIQVGVFSATMPPEALEITRKFMNKPVRILVKRDELTLEGIKQFYVNIDKEDWKLDTLCDLYETLAITQSVIFVNTRRKVDWLTDKMRSRDHTVSATHGDMDQNTRDIIMREFRSGSSRVLITTDLLARGIDVQQVSLVINYDLPTQPENYLHRIGRSGRFGRKGVAINFVTRDDERMLFDIQRFYNVTVEELPANVADLL

SEQ ID NO: 470 - DNA, 1825 bp, Zea mays
gcgctaaaacaccaaaaggtgccacttaaacaaacattatacatcaacaggtgaaagcagagtaaacagattttactcagaacagcaacgaccggtgctgcagacacatggcacgatacaactggttgcagcagaattgagtcaaggatgacaaataattcggtcatacatagttttaaacaaaatactaacaaaaagaaaaaggactcccatagccagcagagccttcgtcttcatactaatgaaccaccacaacagcacgaggcctaggcagctacaaaatttcccaaaacatggcataaagaaaaatcgcatattgcccgagaccacgactttaacatagaaaccccaccgaccttatcactcctcccccacaatatttcggcaaaaccaagccttaccagatcacccccaccaccgttcttttagttctgtttttcttcaaaatgatcacagaaggtcagcgacgttggcaggcagctcctcaatcaacacgttgtagaacttctggatgtcgaacagcatccgctcgtcgtcgcgggtcacaaagttgatggcaacacccttcctaccgaaacgaccactacgaccaatgcgatgcaggtaattctctggctgggtggggagatcatagttgatgaccagggacacctgctgaacatcaataccacgagcaagcaggtcggtggtgatgagcacacgggaggagccagaccggaactccctcatgatgatgtctctagtgttctggtccatgtcaccatgagtggcagaaacagtgtggtccctgctcctcatcttgtcagtgagccagtccaccttgcggcgggtgttgacaaagatgacactctgggtgatggcaagggtctcgtacaggtcacacagtgtgtccagcttccagtcttccttatccacattcacatagaactgcttgataccctcaagagtcagctcatctctcttcacgaggattctcactggcttgttcatgaacttgcgggtaatctcaagggcctcagggggcatggtagcagagaagactccaacctgaatcttggctgggagaagctggaagatgtcgtaaatctgatccttgaaaccacgagaaagcatttcatcagcttcatctagaacaaacatcttgatgttatcagggcggagggactgtctgcgcagcatatcaaacacacgaccaggtgtaccaacaacaacatgcacaccactgccaagaatcctttggtcctcacggacggatgttcctcccacacatgcatggaccttaacaccaaggtaatcaccaagcgcgcgcatgactttctcgatttgctgtgcaagctcacgggtgggagcaaggaccagggcctggcattcaaccaggccatagtccagctgctgcaagatcccagaacagaaggttgctgtctttcctgtaccagattgtgcttgctgaatgacatcaagacccttgcagaagggaacaattcctctctgctgaattgcagatggcttctcaaaaccataagcataaatgcctctcagaagattctcttggaggcccatatcatcaaaactctcaaaaacttcatcatatgaagtgaagaactcctcagtctcaccggtgctcagcagctcctgcatcttagaatcatagtgcttagcatcgaactgagaaccctcaggtgccattcctgccatgactgaagcgacggagaggagagcgcggatcgggccgggagtcggggctgctctgtgcgctgcggtgaacccgagatcggagtctcggattcggcggcgaaggcgagggacgtcgcggcgcaggagagag

SEQ ID NO: 471 - protein, 414 aa, Zea mays
MAGMAPEGSQFDAKHYDSKMQELLSTGETEEFFTSYDEVFESFDDMGLQENLLRGIYAYGFEKPSAIQQRGIVPFCKGLDVIQQAQSGTGKTATFCSGILQQLDYGLVECQALVLAPTRELAQQIEKVMRALGDYLGVKVHACVGGTSVREDQRILGSGVHVVVGTPGRVFDMLRRQSLRPDNIKMFVLDEADEMLSRGFKDQIYDIFQLLPAKIQVGVFSATMPPEALEITRKFMNKPVRILVKRDELTLEGIKQFYVNVDKEDWKLDTLCDLYETLAITQSVIFVNTRRKVDWLTDKMRSRDHTVSATHGDMDQNTRDIIMREFRSGSSRVLITTDLLARGIDVQQVSLVINYDLPTQPENYLHRIGRSGRFGRKGVAINFVTRDDERMLFDIQKFYNVLIEELPANVADLL

SEQ ID NO: 472 - DNA, 1567 bp, Zingiber officinale
gcacgagggttgctcccgcccgatctcgcgctcatcaagtcgatttctcctccctgcttcctcgatctagcgatcagatatggctggacaggcaccagaaggatcacagtttgatgctcgccaatatgataccaaaatgaatgagctgctaaatgctgatgggcaggactttttcacatcttatgatgaagtctatgaaagctttgatgatatgggtcttcaggagaatcttcttagaggcatttatgcctatggttttgagaagccctcagcaattcagcaaagaggaattgttcccttttgcaagggactagatgttattcagcaagcacaatcagggaccgggaaaaccgccaccttttgttctggtattctgcagcagcttgattatggtctggttcaatgccaagccttggttcttgctccaactagagaattagcccagcaaattgagaaggtcatgcgagcacttggtgactaccttggtgtaaaagttcatgcttgtgtcggaggaacaagtgttcgtgaggaccagcgtattctttcaagtggggttcatgttgtggtgggcactcctggtcgtgtttttgacatgttgaggaggcagtctcttcgccctgattatattaaaatgtttgtcttggatgaggctgatgaaatgctttcacgtggcttcaaggatcagatctacgacatcttccagctacttccttcaaagattcaggttggagtcttttctgccacaatgccacctgaagccctggagatcacacggaagttcatgaacaaacctgttaggattcttgtgaagcgcgatgaactcaccctcgagggtattaagcagttctatgtgaacattgagcaggaagattggaaactagataccctctgtgacctctacgagacactggccatcactcaaagtgtcatcttcgtcaacacccgccgcaaggtcgactggctcactgacaaaatgaggagcagagatcacaccgtctcagccactcacggcgacatggaccagaacaccagggacatcatcatgcgtgaattccgctcaggctcctctagagtcctcatcacaactgacctgcttgcccgtggtatcgacgtccagcaagtctcactcgtcataaactacgatctaccaacgcagccagagaactacctccacaggatcggacgaagtggacggttcgggagaaagggtgtggcgataaactttgttgtccgtgacgatgagaggatgctgtatgacatccaaaagttttacaacgttgtgatagaggagctgccttccaatgtcgctgatctcatctgagcctagaactgctgaagcgatagctggggttatttatgcactggtaggcctccatcagaaggcaggcctgttttgttttgttttttaattaagctctatctattttcagtggtaagaattgcgctttttgttttttgttttctttaacagtaatttgaaacaagtatgaaacttttagcttgtcttgtgagagctgttgaggactcttgtgagaggcaagatggaatgaatatttttgttcactgc

SEQ ID NO: 473 - protein, 413 aa, Zingiber officinale
MAGQAPEGSQFDARQYDTKMNELLNADGQDFFTSYDEVYESFDDMGLQENLLRGIYAYGFEKPSAIQQRGIVPFCKGLDVIQQAQSGTGKTATFCSGILQQLDYGLVQCQALVLAPTRELAQQIEKVMRALGDYLGVKVHACVGGTSVREDQRILSSGVHVVVGTPGRVFDMLRRQSLRPDYIKMFVLDEADEMLSRGFKDQIYDIFQLLPSKIQVGVFSATMPPEALEITRKFMNKPVRILVKRDELTLEGIKQFYVNIEQEDWKLDTLCDLYETLAITQSVIFVNTRRKVDWLTDKMRSRDHTVSATHGDMDQNTRDIIMREFRSGSSRVLITTDLLARGIDVQQVSLVINYDLPTQPENYLHRIGRSGRFGRKGVAINFVVRDDERMLYDIQKFYNVVIEELPSNVADLI

SEQ ID NO: 474 - DNA, 1188 bp, Aureococcus anophagefferens
atgagagatgtatccacgaccgaaattgaaatgaacggtctgtcaacagacgtgaaagtaatcgatagtttcgagggaatggctttgcgagaggatctgctgcggggcatctacgcctatggtttcgaacgcccttccgctatccaacaacgagcaatcacgccaatcgtagctggacgcgatgtcattgctcagtcacaatcgggtacagggaaaaccgcggtattctgtatcgcgatgctccaggtgcttgaatctgcaaccaacgaaacacaaatgttgacgatatccccgacacgtgagcttgctgagcagacgcagaaggtatgtttggctctcggtgactacatgaacgtgcagtgtcatgcttgtatcggaggcaagtcaataggcgaggatattcgtcgtttggactacggtgtgcaaattgttagcgggacgcctgggcgtgtcttcgatatgattaagcgacgtaacctgcggaccaggaatttgaagatgttggtcatcgatgaagccgacgaaatgctgaatcggggtttcaaagaacagatatatgatatctaccgctaccttccaccgtccacacaggttgttctcatatctgccactatgccgcaggaggtattagacatgactcgtaaattcatgaacgagcccgtacgtgttctcgttaagcgtgatgaactcaccttggagggaatcaagcagttctttgtggcggttgagcgcgaggaatggaagtttgacacgctctgtgatttgtacgacacactcaccatcacgcaggctgtcattttctgcaacacaaagcgcaaagttgattggttagccaacaagatgcgagaggctaatttcacagtttctgcaatgcatggtgacatgcctcagcgggagcgtgatgccatcatggccgagttccgggggggcgcgtctcgcgttttgattgcgaccgacatttggggccgcgggcttgacgttcaacaagtgtctctcgtcatctgctatgacctacccaacaatcgtgagctatatatacatcgcattgggcgctccggaagatttggccgcaagggtgttgcaattaacttcgtaaaaaatgacgacgtgcggatcctccgggatattgagcagtactattcgactcagattgatgaaatgcccatgaatgtcgcagatctcatctaa

SEQ ID NO: 475 - protein, 395 aa, Aureococcus anophagefferens
MRDVSTTEIEMNGLSTDVKVIDSFEGMALREDLLRGIYAYGFERPSAIQQRAITPIVAGRDVIAQSQSGTGKTAVFCIAMLQVLESATNETQMLTISPTRELAEQTQKVCLALGDYMNVQCHACIGGKSIGEDIRRLDYGVQIVSGTPGRVFDMIKRRNLRTRNLKMLVIDEADEMLNRGFKEQIYDIYRYLPPSTQVVLISATMPQEVLDMTRKFMNEPVRVLVKRDELTLEGIKQFFVAVEREEWKFDTLCDLYDTLTITQAVIFCNTKRKVDWLANKMREANFTVSAMHGDMPQRERDAIMAEFRGGASRVLIATDIWGRGLDVQQVSLVICYDLPNNRELYIHRIGRSGRFGRKGVAINFVKNDDVRILRDIEQYYSTQIDEMPMNVADLI

SEQ ID NO: 476 - DNA, 1627 bp, Aureococcus anophagefferens
agaccgaagatggcgaacgagagaaactacgttagctccgaaatggacattacacagtcaacagacgtgaaagtaatcgatagtttcgagggaatggctttgcgagaggatctgctgcggggcatctacgcctatggttttgaacgcccttccgctatccaacaacgagcaatcacgccaatcgtggctggacgcgatgttatcgctcagtcacaatcgggtacagggaaaaccgcggtattctgtatcgcgatgctccaggtgcttgaatctgcaaccaacgaaacacaaatgctgacgatatccccgacacgtgagcttgctgagcagacgcagaaggtatgtttggctctcggtgactacatgaacgtgcagtgtcatgcttgtatcggaggcaagtcaataggcgaggatattcgtcgtttggactacggtgtgcaaattgttagcgggacgcctgggcgtgtcttcgatatgattaagcgacgtaacctgcggaccaggaatttgaagatgttggtcatcgatgaagccgacgaaatgctgaatcggggtttcaaagaacagatatatgatatctaccgctaccttccaccgtccacacaggttgttctcatatctgccactatgccgcaggaggtattagacatgactcgtaaattcatgaacgagcccgtacgtgttctcgttaagcgtgatgaactcaccttggagggaatcaagcagttctttgtggcggttgagcgcgaggaatggaagtttgacacgctctgtgatttgtacgacacactcaccatcacgcaggctgtcattttctgcaacacaaagcgcaaagtttctgcaatgcatggtgacatgcctcagcgggagcgtgatgccatcatggccgagttccgggggggcgcgtctcgcgttttgattgcgaccgacatttggggccgcgggcttgacgttcaacaagtgtctctcgtcatctgctatgacctacccaacaatcgcgagctatacatacatcgcattgggcgctctggaagatttggccgcaagggtgttgcaattaacttcgtaaaaaatgatgacgttcggatcctccgggatattgagcagtactattcgactcagattgatgaaatgcccatgaatgtcgcagatctcatctaaatcccggctgtcgtaaccaccggctggatggacactcacacctgatgatctttggcgagtgccgtaggctcccaagacctgccgcagaagtaccgtggacatactctgtggacttttggacgggacttcggaggcggacagtcacaattatgttctcagatatgcgatgtgcttattgaggccccagtcctccggatactaagcctggccctccaggtgctgagcctggcaacgcaaggcggcaaactggaattgcctgcccttgtgcggccaaagccccggcgaaagccccgtcctgtacagcgaggcccgtcctacaaacgccgaaatcgacgctagagagcaagggtgctggtatatgcaggagcatgctcagacgaagtcttgcaaacgtccgaagctccccgggtcgtctttgtgtccgaagtacgatgctgatagcaagatagtaaactccgggacaggg

SEQ ID NO: 477 - protein, 383 aa, Aureococcus anophagefferens
MANERNYVSSEMDITQSTDVKVIDSFEGMALREDLLRGIYAYGFERPSAIQQRAITPIVAGRDVIAQSQSGTGKTAVFCIAMLQVLESATNETQMLTISPTRELAEQTQKVCLALGDYMNVQCHACIGGKSIGEDIRRLDYGVQIVSGTPGRVFDMIKRRNLRTRNLKMLVIDEADEMLNRGFKEQIYDIYRYLPPSTQVVLISATMPQEVLDMTRKFMNEPVRVLVKRDELTLEGIKQFFVAVEREEWKFDTLCDLYDTLTITQAVIFCNTKRKVSAMHGDMPQRERDAIMAEFRGGASRVLIATDIWGRGLDVQQVSLVICYDLPNNRELYIHRIGRSGRFGRKGVAINFVKNDDVRILRDIEQYYSTQIDEMPMNVADLI

SEQ ID NO: 478 - DNA, 1647 bp, Aquilegia formosa x pubescens
ggccatggctgcaatagcatcaacctcagcgacaattccgggaagcgtccgaaatagacggaatggaggagtaggagcaccagatgatgaaaaactagtatttgaaacaagtcatggagttgaaccaataacaacatttgatcaaatgggtatgaaagatgatttattacgtggaatatatcaacatggttttgaaaaaccatctgcaattcaacaaagagctgttttacctataattaaaggtcgtgatgttattgctcaagctcaatctggtactggtaaaacttctatgattgctattactgcttgtcaggtcgttgatacttctataagagaggtccaagtgttgatcttgtcacctactagagaacttgcttcacagactgagaaagtgactctggcagttggaaatttcatgagcgtacaggtccatgcatgtataggaggccaaagcattggtgaagatataaggaaactagattatggggttcatgtagtgtctggaaccccaggcagagtctgtgacatgatcaagagaagagccttgcgcactagagcaatcaaattattagttctcgatgaatctgatgagatgttgagcagaggcttcaaagatcagatatatgatgtttatcgatatcttccaccagagcttcaggttgtcttgatatctgcaacccttcctcacgaaatattggaaatgacaagcaagtttatgacagatcctgttaggatccttgtgaaacgtgatgagttaactttggagggaatcaagcagttctttgtggctgttgagaaagaagagtggaagtttgataccttgtgtgatctgtatgacacccttacaatcactcaagcagtcattttttgcaatacaaaacgaaaggtggattggcttactgagaagatgaggagctataacttcactgtttcctccatgcatggagacatgcctcaaagggagcgagatgaaattatgaaatctttcagagacatggcgacccgtgttttgataacaacagatgtttgggctcggggacttgatgttcaacaggtctctttggtaatcaattatgaccttccaaataatcgtgagctttatattcatcgtatcggtcgatctggtcgttttggccgcaagggtgttgccataaattttgttcgcaatgacgacatcaggatattaagagacatagagcagtattacagtacgcagattgatgaaatgcccatgaatgtagctgatctgatatgatcatctggttgcatgctcaaaagatgtgttgaacaacaaaagtttgagtagggatgttgatatgattgcttgactagtgaagactcttctgtgcggtggtgttacctatttgaatatttatatcctacgcagatttaatggggtttattccattatttgaagccttgtgggttttcttaagcgagataaggtgttgatcctgactttcagatggggctttggtgtgcttgtatttttatggtgccattgttcttaagtagcattagattagactggccttgcttaactgtcagagtgtgatgtcttgttttctctaacgttattttgcggtttctctaacatgaccaacttattagttctcttactctgatatggttctacctatttatgac

SEQ ID NO: 479 - protein, 416 aa, Aquilegia formosa x pubescens
MAAIASTSATIPGSVRNRRNGGVGAPDDEKLVFETSHGVEPITTFDQMGMKDDLLRGIYQHGFEKPSAIQQRAVLPIIKGRDVIAQAQSGTGKTSMIAITACQVVDTSIREVQVLILSPTRELASQTEKVTLAVGNFMSVQVHACIGGQSIGEDIRKLDYGVHVVSGTPGRVCDMIKRRALRTRAIKLLVLDESDEMLSRGFKDQIYDVYRYLPPELQVVLISATLPHEILEMTSKFMTDPVRILVKRDELTLEGIKQFFVAVEKEEWKFDTLCDLYDTLTITQAVIFCNTKRKVDWLTEKMRSYNFTVSSMHGDMPQRERDEIMKSFRDMATRVLITTDVWARGLDVQQVSLVINYDLPNNRELYIHRIGRSGRFGRKGVAINFVRNDDIRILRDIEQYYSTQIDEMPMNVADLI

SEQ ID NO: 480 - DNA, 1533 bp, Aquilegia formosa x pubescens
tctctcttaaagaaagaaacaaaactccaaagctttgaatctacctttcttcttcatcaacttgaaaggccaattatggcgacggcggcagtagcttcagttattccggcgaatggaagaaggaaacaacaaagaggtggtattaagagtaacaataacaaggatgaagaacagatagtttttgaaacaagtgttggagtagaagcgataacaagttttgataagatgggtattaaagatgaattacttcgaggtatatatcaacatggatttgaaaaaccttcagcaatacaacaaagagctatgttaccaattatcaaaggtcgtgatgttattgctcaagctcaatctggtactggaaagagttctatgatttctgttgtttcttgtcaaatcgttgatacttctgttaaagatgttcaagtattgatcttgtcccctacaagggaactcgcttcacagactgagaaagtaatcttggcagttggtaactacatgaatgtacaagctcatgcatgtgttggaggcaaaagtttggctgaggatataaggaaactggatcatggagtccatgttgtatctggaacgcctggtagagtctgtgacatgattaaaagaagaacattgcgcaccagagctatcaaattgctagtacttgatgaatctgatgagatgctgagcagaggttttaaggatcagatttatgatgtttacagatatcttccaccagagatacaggttgtcttgatctctgcaactcttccaaacgagattttggaaattacaagcaaatttatgacagatccaattagaatccttgtgaagcgtgatgaattgactttggaggggataaagcagttctttgttgctgttggaaaagaagaatggaagtttgatacattgtgtgatctatatgatacactcaccatcacccaagctgttattttctgtaacacaaagcgaaaggtggattggctttgtgagaaaatgcgtagtaataactttacagtatcctcaatgcatggagacatgcctcagcaggagcgagatgcaataatgtcagagttcaggcaaacagaaactcgtgttcttatcacaacagatgtgtgggctcgtgggcttgacgttgaacaggtatctttggtgattaattatgatcttccaaacaatcgggagctttacattcatcggataggtcgctctggtcgttttggacgcaagggtgttgcaatcaactttgtccgcaatgatgacatcagaattctgagagatatagagcagtattacagtacgcagattgatgagatgccagtgaatgtgcaagatctgatatagtatgctgattgtttcttttgttgaaagggtgggatgtagcacagctttcgtgacatgaaggtttgcagggacaacaaaaaaacatttgaaactgagtgggcattttgtgtgtaaatttctaatctgagctttttcgcctcagcaaaattagaattgtttagatctgggagcaacatttaattcagcgattttgcataa

SEQ ID NO: 481 - protein, 419 aa, Aquilegia formosa x pubescens
MATAAVASVIPANGRRKQQRGGIKSNNNKDEEQIVFETSVGVEAITSFDKMGIKDELLRGIYQHGFEKPSAIQQRAMLPIIKGRDVIAQAQSGTGKSSMISVVSCQIVDTSVKDVQVLILSPTRELASQTEKVILAVGNYMNVQAHACVGGKSLAEDIRKLDHGVHVVSGTPGRVCDMIKRRTLRTRAIKLLVLDESDEMLSRGFKDQIYDVYRYLPPEIQVVLISATLPNEILEITSKFMTDPIRILVKRDELTLEGIKQFFVAVGKEEWKFDTLCDLYDTLTITQAVIFCNTKRKVDWLCEKMRSNNFTVSSMHGDMPQQERDAIMSEFRQTETRVLITTDVWARGLDVEQVSLVINYDLPNNRELYIHRIGRSGRFGRKGVAINFVRNDDIRILRDIEQYYSTQIDEMPVNVQDLI

SEQ ID NO: 482 - DNA, 1325 bp, Aquilegia formosa x pubescens
ggcgagaatcgtgtaaaagcttgaaaaagtttctacagacttgttctaacatggctgaacgtgataaacgtcccgccagagccgaggatcctgacccagaggatttcgaaaccaccaccggagtcaaggttgtccccacgttcgagctgatgggtctgaagcccgacctgcttcgtggaatctatgcttacaattttgagcatccctccgccattcagcagcgtgccatcgtccccatcatctctggtcgcgatgttattgcacaggctcaatcaggaactggtaagacatcactcttctcagtttgcgccctccaggccgtcaaggaggacgtccgtgaaacgcaagttttgatcctgtccccaacgagagaattggctgcacagattacacgcaccatttcatcgcttggaacacacatgagcgccgatgtgcactgctgcgtcggtggcaaggccgtcggtgaggacattcgcaaactcgaggccggcacccagatcgtgtcaggaacgcccggacgtgtgtatgatatgattcgtcgccgcacgatgcgcacgaaagagatcaaaatgttggtactcgacgaggccgaccagatgctcgacaagggcttcaaggagcaaatctatgatgtctacagatacttgccgcctcgcacgcaagttgttttagtctccgccacacttcctcgtgaggtcttggaaatgacacgaaagtttatgacacagccgattcgcatcttggtcaagcgtgatgaattgacgctcgagggcatcaagcaattcttcgttatggtcgagaaggaggagtggaagtttgatacgctgtgcgatctatatgatacattgacgatcacgcaggccgtcatcttttgcaacacgcgcaagaaggtcgattggctcaccgagcatatgcagaaggccagctttaccgttgttgccatgcatggtgagatgccacagaatgaacgtgaggaaattatgaaggcctaccgctctggcgacgctcgtgtgctcatcaccaccgacatttgggcgcgcggtatcgatgtgtcgcaggtctctctcgttatcaattatgatcttcctactgccagagaaacctacttgcatagaattggccgctctggtcgcttcggacgcaagggtgttgccatcaactttgtcaagagcgacgaagttcgcacgctgcgtgatatcgagcagttctattccacacaaatcgatgaaatgccaatgagtgttgctgatctcgtcaattaaatccggcggcgaaggctggaagccgctttggcgtttgccattgtacagaagcttgaataacaa

SEQ ID NO: 483 - protein, 403 aa, Aquilegia formosa x pubescens
MAERDKRPARAEDPDPEDFETTTGVKVVPTFELMGLKPDLLRGIYAYNFEHPSAIQQRAIVPIISGRDVIAQAQSGTGKTSLFSVCALQAVKEDVRETQVLILSPTRELAAQITRTISSLGTHMSADVHCCVGGKAVGEDIRKLEAGTQIVSGTPGRVYDMIRRRTMRTKEIKMLVLDEADQMLDKGFKEQIYDVYRYLPPRTQVVLVSATLPREVLEMTRKFMTQPIRILVKRDELTLEGIKQFFVMVEKEEWKFDTLCDLYDTLTITQAVIFCNTRKKVDWLTEHMQKASFTVVAMHGEMPQNEREEIMKAYRSGDARVLITTDIWARGIDVSQVSLVINYDLPTARETYLHRIGRSGRFGRKGVAINFVKSDEVRTLRDIEQFYSTQIDEMPMSVADLVN

SEQ ID NO: 484 - DNA, 1452 bp, Arabidopsis thalliana
tctcccgacactttcctcttcaaatcccaaacggctatctgactttggaagaaagagagattcagagtggagaatattatggaaggaactttagatgaagagaatctagtcttcgaaaccaccaaaggtatcaaaccaatcaagagtttcgatgacatggggatgaatgataaagttcttcgcggcgtttatgactacggttacaagaaaccatctgagattcagcagagagctttggttccgattctcaaaggacgagacgtcatagctcaggctcagtccggtactggtaaaacctctatgattgctatctccgtttgccaaatcgtcaacatatcctccagaaaggttcaagtcttggtgttgtctccatcaagagagctggcttcacaaacagagaagactatacaggctattggggcacataccaatattcaggcgcatgcttgcattggtggtaagagcatcggtgaagatatcaagaagctagagcgtggtgtccacgctgtgtctgggacacctggtcgagtttacgatatgataaagagaggaagcttacaaactaaagctgttaaacttttggttctggatgaatcagatgaaatgctgagtaaaggtttgaaagaccagatttatgacgtttacagagctcttccacacgatattcaggtttgcttgatttctgctactcttcctcaagagattttggagatgacagaaaagtttatgacagatcctgtgaggattcttgtgaagcctgatgaattgactcttgaaggaatcaaacaatactatgttgatgttgataaagaagagtggaaattcgatactctttgcgatctttatggaagacttactattaaccaagctattatcttctgcaacacaagacaaaaggttgattggcttactgagaagatgaggagtagcaatttcatagtctcatcaatgcatggagacaaacgtcaaaaggagagagatgatatcatgaaccagtttcggtcatttaaaagccgtgttttaatcgcctcagatgtatgggcacgagggatcgacgttcaaactgtttctcatgtcatcaattatgatatacccaacaacccggagctatacattcatcgtataggacgagctggtcgttttggtcgtgaaggtgttgccattaactttgtaaaatcttcggatatgaaagatcttaaggatattgagcgacattacggtactaaaatccgcgagatgccagctgatcttgtctaaagatgttgtttccttgaagctgaagttatagaatcggttttgaaagaagttttgttcttcaactatccattggtttagacttaggcacaagctctttgaaaatgtatacctcacttcagtcatttcttttgtaccaaccaaaataatattattgtagctattttattttctgaaaatcaacaaattgtgtttggc

SEQ ID NO: 485 - protein, 392 aa, Arabidopsis thalliana
MEGTLDEENLVFETTKGIKPIKSFDDMGMNDKVLRGVYDYGYKKPSEIQQRALVPILKGRDVIAQAQSGTGKTSMIAISVCQIVNISSRKVQVLVLSPSRELASQTEKTIQAIGAHTNIQAHACIGGKSIGEDIKKLERGVHAVSGTPGRVYDMIKRGSLQTKAVKLLVLDESDEMLSKGLKDQIYDVYRALPHDIQVCLISATLPQEILEMTEKFMTDPVRILVKPDELTLEGIKQYYVDVDKEEWKFDTLCDLYGRLTINQAIIFCNTRQKVDWLTEKMRSSNFIVSSMHGDKRQKERDDIMNQFRSFKSRVLIASDVWARGIDVQTVSHVINYDIPNNPELYIHRIGRAGRFGREGVAINFVKSSDMKDLKDIERHYGTKIREMPADLV

SEQ ID NO: 486 - DNA, 1655 bp, Arabidopsis thalliana
agagaggaaataagcatttgggggaaatcaatcgaaaaccctaggagagataaaaacaaaaatctagacggagatttatggcgacagcgaatcctggccgtggaggtggtagaagaggcggtggagctatggatgacgataagttggtcttcgagactaccgatggaattgagcccatcacgagcttcaatgatatgggcattaaggaagatgtgcttcgcggtgtctacgaatatggattcgagaagccttccgcgattcagcagagggctgttatgccgattcttcaaggacgtgatgttattgctcaagctcagtccggtaccgggaagacatctatgattgctctctccgtttgtcaagtcgttgatacttcttctagagaggttcaggccttgatattatccccaacaagagagctggctacacaaacagagaagacgatacaagctattggattacatgccaatattcaggcacatgcttgcatcggtgggaatagtgttggagaagacatcaggaagctggagcatggtgttcatgttgtgtctgggacacctggtcgtgtctgtgacatgataaagaggagaagtcttcgtaccagagctattaaacttctgattcttgatgaatcagatgaaatgctgagcagagggttcaaggaccagatctatgatgtttacagatatcttccaccagatcttcaggtttgcttggtttctgcaactcttcctcacgagattttggagatgacatccaagtttatgacagaaccagtgaagatacttgtgaagcgtgatgagttgactcttgaaggaatcaaacaattttttgttgctgttgagaaggaagagtggaaatttgatacactctgtgatctttatgacacgcttactatcactcaagctgttatcttctgcaatactaaacgaaaggtggattatcttagtgagaaaatgagaagtcacaacttcactgtctcatcaatgcatggagacatgcctcagaaggagagagacgccatcatgaatgagtttcggtcaggtgatagtcgtgttttgataacaacagatgtatgggcacgtgggattgatgtgcaacaagtttctcttgttatcaattatgatctccccaacaaccgtgagctctacatccatcgtattgggcggtctggtcgattcgggcgtaagggtgttgcaatcaactttgttaaaagcgacgacatcaagattctcagagacattgagcagtactacagtacccagattgatgagatgccaatgaatgtagctgatcttatctaaaagagcttgtctgagatttttgtgctttcagcggggaagtgtctggatgaaaaagtattgttgagcgcttctgtcaaattattgcactatcttaacggtgtatttcctttgatgtttctgtgggctcttttgaacaaacttaaactcgcgtgtggtaaatgtttaatgacttgagaagcgatttaggtttagggtttggaccgtttggtttttcgtttcctcgtaattgattctgggggctttgattgtggtttgtgggtcaaaactctcaactatcactacttgtaagacttttgctcgacagttgaaacggttcattgttatcttatttcgtaaagcttggatcattgc

SEQ ID NO: 487 - protein, 408 aa, Arabidopsis thalliana
MATANPGRGGGRRGGGAMDDDKLVFETTDGIEPITSFNDMGIKEDVLRGVYEYGFEKPSAIQQRAVMPILQGRDVIAQAQSGTGKTSMIALSVCQVVDTSSREVQALILSPTRELATQTEKTIQAIGLHANIQAHACIGGNSVGEDIRKLEHGVHVVSGTPGRVCDMIKRRSLRTRAIKLLILDESDEMLSRGFKDQIYDVYRYLPPDLQVCLVSATLPHEILEMTSKFMTEPVKILVKRDELTLEGIKQFFVAVEKEEWKFDTLCDLYDTLTITQAVIFCNTKRKVDYLSEKMRSHNFTVSSMHGDMPQKERDAIMNEFRSGDSRVLITTDVWARGIDVQQVSLVINYDLPNNRELYIHRIGRSGRFGRKGVAINFVKSDDIKILRDIEQYYSTQIDEMPMNVADLI

SEQ ID NO: 488 - DNA, 1179 bp, Chlamydomonas reinhardtii
atggaggaggatgaggaggtcaagtttgagacctcaaagggcgtcaaggtgtacaacacctttgacgccatgggtctgaaggaggagctgcttcgcggactgtatgcgtatgggtttgagaagccatccgccatccaacagcgtgcagtgctgcccatcgtgcaaggtcgcgacgtcattgcgcaggcgcagtcgggcacgggtaaatcatccatgatttccgtgtcgacgtgccagctggtggacgtgcagcagcgcgagtgccaggtcctaattctgtcacccactcgtgagctggcgcagcagactgagaaggttatcctggccgtgggtgacttcatgaacattcaggcgcatgcttgcgtcggtggcaagagcctgggtgaggacatccgcaagctggagaacggcgttcacgtggtgtcgggcacgcccggccgtgtgttcgatatgatccagcgccgaaacctgcgcacgcgccacatcaagacgctgatcctggatgaggcggatgagatgctggccaagaacttcaaggaccagatctacgacatctaccggtacctgccgcccgagacccaggtggtactggtgagcgccacgctgccggcggaggtgctggagatgaccaacaagttcatgacggaccccatccgcgtgctcgtcaagcgtgatgagctgacgctcgagggaatcaagcaattcttcgtggcagtggagcgggaggagtggaagtttgacaccctgtgcgacctgtacgacacgctgaccatcacccaggctgtcatcttctgcaacaccaagcggaaggtggactggctgacggagaagatgcggcaaaacaacttcacggtggcgtccatgcacggagacatggtgcagaaggagcgcgaagccatcatgggggagttccgctccggcgccgcgcgtgtgctcatcacgaccgacgtgtgggctcgcggtctggacgtgcagcaggtgtcgctggtcatcaactacgacctgcccaacaaccgtgagctgtacatccaccgcattggccgctccggacgcttcggccgcaagggtgtggccatcaacttcgtgcgcaacgacgacatccgcatcctgcgcgacattgagcagtattactccacacagattgatgagatgccaatgaacgtggccgagctcatctga

SEQ ID NO: 489 - protein, 392 aa, Chlamydomonas reinhardtii
MEEDEEVKFETSKGVKVYNTFDAMGLKEELLRGLYAYGFEKPSAIQQRAVLPIVQGRDVIAQAQSGTGKSSMISVSTCQLVDVQQRECQVLILSPTRELAQQTEKVILAVGDFMNIQAHACVGGKSLGEDIRKLENGVHVVSGTPGRVFDMIQRRNLRTRHIKTLILDEADEMLAKNFKDQIYDIYRYLPPETQVVLVSATLPAEVLEMTNKFMTDPIRVLVKRDELTLEGIKQFFVAVEREEWKFDTLCDLYDTLTITQAVIFCNTKRKVDWLTEKMRQNNFTVASMHGDMVQKEREAIMGEFRSGAARVLITTDVWARGLDVQQVSLVINYDLPNNRELYIHRIGRSGRFGRKGVAINFVRNDDIRILRDIEQYYSTQIDEMPMNVAELI

SEQ ID NO: 490 - DNA, 1568 bp, Citrus sinensis
ctctcattgattctttgatttcgaagagtaattgttgcgaatttcgtgcgagatggcggcggcgacggctatgcggaggagaggagggggcggcggaatggatgacgacaagatggtgttcgaaacaacggaaggagtggaggcaatcacgagcttcgacgcaatgggaataaaagacgatctgttgcgtggaatttatcagtacggattcgagaagccatcggccatacaacagagggccgttatgccaataataaagggccgtgatgtaattgcacaggcccagtctggtactggcaagacctctatgattgccctaactgtttgccagacggtcgatacttctagcagagaggtgcaggcgttgattttgtcacctacgagggagttggcgacgcagacagagaaagtgattttggcaattggtgattttattaacatacaagcacatgcgtgtgttggaggcaaaagtgtcggggaagatattaggaagttagagcatggagttcatgtggtgtctggaactccgggtagagtctgtgatatgattaagaggaaaactttgcgtactagagctattaaattattggtgcttgatgagtctgatgagatgctgagcagagggttcaaggatcaaatttatgatgtgtaccgttatcttccaccggatcttcaggttgttttgatatctgccacccttcctcacgaaatattggagatgacgaccaaattcatgacagatcctgtaaagattcttgtgaagcgtgatgagttgactttggagggaatcaagcaattttttgttgcagtggaaagagaggagtggaagtttgatacactctgtgatctttatgatacccttacgattacacaagctgttattttctgcaacacgaagcgtaaggtggattggctaacagagaagatgcgcggctataactttactgtctcatcaatgcatggagacatgcctcagaaggaaagagatgcaattatgggagaatttcggtctgggacaacccgtgtgctcatcacaactgatgtttgggcacgaggacttgatgttcagcaggtttctttggtgataaattatgaccttcctaacaatcgtgagctttatattcaccggattggtcgttctggacgttttggacgcaagggtgtagcaataaattttgtcaaaaacgatgatatcaagattcttagagatatcgagcaatattacagtacccagattgatgaaatgccaatgaatgttgctgatctgatataagagatgtttgtgatctcgtctgccagagtggaggttatgggattgatcaatgaaaggttgaagacaattgtgtgattgacagtttctgcaagtgtgacattgtctttgtttttgtgaggagtttgtataatacaggatgttctcatattttctgtatggtattgatgacaaaaaaaaaaaaagagtaggcattaacatttgtgataaaattctagtgattgcctttttgcaccttgacctgattttaagggtggcgaattggttcacggttgaattcaaattatttttaaccctt

SEQ ID NO: 491 - protein, 406 aa, Citrus sinensis
MAAATAMRRRGGGGGMDDDKMVFETTEGVEAITSFDAMGIKDDLLRGIYQYGFEKPSAIQQRAVMPIIKGRDVIAQAQSGTGKTSMIALTVCQTVDTSSREVQALILSPTRELATQTEKVILAIGDFINIQAHACVGGKSVGEDIRKLEHGVHVVSGTPGRVCDMIKRKTLRTRAIKLLVLDESDEMLSRGFKDQIYDVYRYLPPDLQVVLISATLPHEILEMTTKFMTDPVKILVKRDELTLEGIKQFFVAVEREEWKFDTLCDLYDTLTITQAVIFCNTKRKVDWLTEKMRGYNFTVSSMHGDMPQKERDAIMGEFRSGTTRVLITTDVWARGLDVQQVSLVINYDLPNNRELYIHRIGRSGRFGRKGVAINFVKNDDIKILRDIEQYYSTQIDEMPMNVADLI

SEQ ID NO: 492 - DNA, 1649 bp, Chlorella
cccacacaccatcccacagtgtcagcagggtgcgaaagcctcctgggaggccaccaccaccgtgatcgccccgccccgcttgctgtccgccctgcctgcgtgttggggctgccccgcctaaccgtattttgtgtctgacacaggcaaaatggcggacggcggcaggaagaccaacatcgccgagggcgatgtggacatggagtttgagaccagcaagggcgtcaaggtggtcagcagctttgacgccatgggcctgcgggagcagctgctgcgcggcatctaccagtttggcttcgagaagccctcggccatccagcagcgcgcggtgctgcccatcacccagggccgcgacgtcatcgcgcaggcgcagtcgggcacgggcaagacctcgctcatcgccatcacgctgtgccagatgctggacaccacgctgcgggaggtccaggcgctagtgctgtcgcccactcgcgagctggcgacgcaaacagagaagaatatcctggcaataggcgaccacatggcggtgcaggcgcacgcgtgcatcggcggcaagtctgtgggcgacgacatccgcaagctggagaacggcgtgcacattgtgagcggcacccccggccgcgtgttcgacatgatcaagcggcgcagcctgaggaccaggaacatcaagacgctggtgctggatgaggctgacgagatgctgaacaaggggttcaaggagcagatctacgacatctaccgctacctgccgcccgagacgcaggtggtgcttgtgtctgccacgctgccccacgaggtgctggagatgacccacaagttcatgaccgacccggtgcgcatcctggtcaagcgcgatgagctgacgctggagggcatcaagcagttctttgtggcggtggagcgcgaggagtggaagtttgacacgctgtgcgacctgtacgacacgctcaccatcacccaggcagtcatcttctgcaacaccaagcgcaaggtggactggctgacggagaagatgcggcagaacaacttcaccgtgtcggccatgcacggcgacatgccccagaaggagcgggaggcgatcatggatgagttccgcaagggcgccacccgcgtgctcatcaccacagacgtgtgggctcgcggcctggacgtgcagcaggtgtcgctggtcatcaactacgacctccccaactcccgcgagctctacatccaccgcatcggccgttcgggtcgctttggccgcaagggtgtggccatcaactttgtgaagaacgacgacatcaagatcctgcgcgacattgagcagttctactccacgcagatagatgagatgcccatgaacgttgccgacctgatttaaggccttggtggttgctgctgcttttggtggcgccatcccggcgtgcaccgagtgagcggctggtgctgtcaccgctggcgggtctcactctgctgctggcctggctgcggcaagcccagcgatgccataccccggcttttgtttccatttgttcctgctctgtggtgtcctgctttgttgccgcatcatctattttacccgcctctccctcgccctcaccatctgcctgcctcttccctcctgacaccttgacttccgcgtggcatggtatgctgtaagtgtgacaacacac

SEQ ID NO: 493 - protein, 402 aa, Chlorella
MADGGRKTNIAEGDVDMEFETSKGVKVVSSFDAMGLREQLLRGIYQFGFEKPSAIQQRAVLPITQGRDVIAQAQSGTGKTSLIAITLCQMLDTTLREVQALVLSPTRELATQTEKNILAIGDHMAVQAHACIGGKSVGDDIRKLENGVHIVSGTPGRVFDMIKRRSLRTRNIKTLVLDEADEMLNKGFKEQIYDIYRYLPPETQVVLVSATLPHEVLEMTHKFMTDPVRILVKRDELTLEGIKQFFVAVEREEWKFDTLCDLYDTLTITQAVIFCNTKRKVDWLTEKMRQNNFTVSAMHGDMPQKEREAIMDEFRKGATRVLITTDVWARGLDVQQVSLVINYDLPNSRELYIHRIGRSGRFGRKGVAINFVKNDDIKILRDIEQFYSTQIDEMPMNVADLI

SEQ ID NO: 494 - DNA, 1532 bp, Citrus x paradisi x Poncirus trifoliata
tgcgactttcgtgcgagatggcggcggcgacggctatgcggaggagaggagggggcggcggaatggatgacgacaagatggtgttcgaaacaacggaaggagtggaggcaatcacgagcttcgacgcaatgggaataaaagacgatctgttgcgtggaatttatcagtacggattcgagaagccatcggccatacaacagagggccgttatgccgataataaagggccgtgatgtaattgcacaggcccagtctggtactggcaagacctctatgattgccctaactgtttgccagacggtcgatacttctaacagagaggtacaggcgttgattttgtcacctacgagggagctggcgacgcagacagagaaagtgattttggcaattggtgattttattaacatacaagcacatgcgtgtgttggaggcaaaagtgtcggggaagatattaggaagttagagcatggagttcatgtggtgtctggaactccgggtagagtctgtgatatgattaagaggaaaactttgcgtactagagctattaaattattggtgcttgatgagtctgatgagatgttgagcagagggttcaaggatcaaatttatgatgtgtaccgttatcttccaccggatcttcaggttgttctgatatctgccacccttcctcacgaaatattggagatgacgaccaaattcatgacagatcctgtaaagattcttgtgaagcgtgatgagttgactttggagggaatcaagcaattttttgttgcagtggaaagagaggagtggaagtttgatacactctgtgatctttatgatacccttacgattacacaagctgttattttctgcaacacgaagcgtaaggtggattggctaacagagaagatgcgtggctataactttactgtctcatcaatgcatggagacatgcctcagaaggaaagagatgcaattatgggagaatttcggtctgggacaacccgtgtgctcatcacaactgatgtttgggcacgaggacttgatgttcagcaggtttctttggtgataaattatgaccttcctaacaatcgtgagctttatattcaccggattggtcgttctggacgttttggacgcaagggtgtagcgataaattttgtcaaaaatgatgatatcaagatttttagagatatcgagcaatattacagtacacagattgatgagatgccgatgaatgttgctgatctgatataagagatgtttgtgatctcatcttccagagtggaggttatgggattgatcaaagaaaggttgaagacaattgtgtgattgacagtttctgcaagtgtgacatttgtcttttttttgtgaggagtttgtataatacaggatgttctcatattttctgtatggtattgatgacaagaaaagaggagagtaggcattaacatttgtgataagattctagtgattgccttttgcaccttgacctgattttaagggtggtgatttgttcaaaggtgaattcaagttattttaaccattttg

SEQ ID NO: 495 - protein, 406 aa, Citrus x paradisi x Poncirus trifoliata
MAAATAMRRRGGGGGMDDDKMVFETTEGVEAITSFDAMGIKDDLLRGIYQYGFEKPSAIQQRAVMPIIKGRDVIAQAQSGTGKTSMIALTVCQTVDTSNREVQALILSPTRELATQTEKVILAIGDFINIQAHACVGGKSVGEDIRKLEHGVHVVSGTPGRVCDMIKRKTLRTRAIKLLVLDESDEMLSRGFKDQIYDVYRYLPPDLQVVLISATLPHEILEMTTKFMTDPVKILVKRDELTLEGIKQFFVAVEREEWKFDTLCDLYDTLTITQAVIFCNTKRKVDWLTEKMRGYNFTVSSMHGDMPQKERDAIMGEFRSGTTRVLITTDVWARGLDVQQVSLVINYDLPNNRELYIHRIGRSGRFGRKGVAINFVKNDDIKIFRDIEQYYSTQIDEMPMNVADLI

SEQ ID NO: 496 - DNA, 1215 bp, Emiliania huxleyi
ctcgaaggcgcgcctcgccgcccgccgcgctgcgccatgacggcgatggttgacgacgagacgctcgacttcagcacgtcggacgacgtgcagatcgtcgagtccttcgatgccatggggctcaaggacgagctgctccgcggcatctacgcgtacggctttgagaagccgtccgccatccagcagcgcgccatcatgcccatcctcaagggccgcgacaccatcgcgcaggcgcagtcgggcaccggcaagacgaccatcttttcggtgggcgtgctgcactgcatcgacacctcgcagcgcgagacgcaggcgctcgcgctctccccgacgcgcgagctggcagagcagacgcaaaaggtgatgctcgcgctcggagactacatgtcggtgcagtgccacgcctgcatcggaggcaagtcgatcggcgaggacatccgccgcctcgacgccggagtgcacgccgtctccggcacgccgggccgcgtcttcgacatgatccgccgccgcaacttgcgcacgcgcgcaatcaagatgctcgtcatcgacgaggcggacgagatgctctcccagggcttcaaggagcagatctacgacatctaccgctacctgccgcccgccacccaagtcgtcctcatctcggcgacgctgcccaacgagatcctcgagatgacgcgcaagtttatgactgaccccgttcggattctggtcaagcgcgacgagctgacgctcgagggcatcaagcagttcttcgtcgcggtcgagcgggaggagtggaagttcgacacgctctgcgacctgtacgacaccctcaccatcacgcaggcggtcatcttttgcaacacgaagaagaaggtcgactggctcacccacaagatgaggcaggcaaacttcaccgtctcctccatgcacggggacatgccgcaaaaggagcgcgacgcaatcatggccgagttccgctcgggcgactcgcgcgtcctcatcgccacagacgtgtggggccgcggcatcgacgtgtcgctcgtgatcaactacgacctccccaacaaccgcgagctctacatccaccgcatcggccgctcgggccggttcggccgcaagggcgtcgcgatcaacttcgtcaagagcgacgacatccgcatcctgcgcgacatcgagcagttctactcgacgcagatcgacgagatgccgatgaacgtagcagacctgatctag

SEQ ID NO: 497 - protein, 392 aa, Emiliania huxleyi
MTAMVDDETLDFSTSDDVQIVESFDAMGLKDELLRGIYAYGFEKPSAIQQRAIMPILKGRDTIAQAQSGTGKTTIFSVGVLHCIDTSQRETQALALSPTRELAEQTQKVMLALGDYMSVQCHACIGGKSIGEDIRRLDAGVHAVSGTPGRVFDMIRRRNLRTRAIKMLVIDEADEMLSQGFKEQIYDIYRYLPPATQVVLISATLPNEILEMTRKFMTDPVRILVKRDELTLEGIKQFFVAVEREEWKFDTLCDLYDTLTITQAVIFCNTKKKVDWLTHKMRQANFTVSSMHGDMPQKERDAIMAEFRSGDSRVLIATDVWGRGIDVSLVINYDLPNNRELYIHRIGRSGRFGRKGVAINFVKSDDIRILRDIEQFYSTQIDEMPMNVADLI

SEQ ID NO: 498 - DNA, 1581 bp, Gossypium hirsutum
atttcttatttccgagctgtcaataaattttcttctcctcccgttagccccccacgaacttaggcaaagcagaggctagagagatgtcggcggcggcggcggcgacaagccgagcgactcgacggatgggagccgaggatgagaagctagtgttcgaaacgacggaaggaatcgagccgatattgagtttcgatcagatgggactaaaagacgatctcctccgtggaatctacaattacggcttcgaaaagccatctgctatccagcagagagccgtcatgccgataatcaatggccgcgacgtcattgcccaagctcagtctggtaccggtaaaacctccatgattgccctcaccgtttgccaagtggttgacacagctagcagagaggttcaagcattgatactgtcacccacgagggaactggcttcacaaacggagaaagtgatacggacaattggtgatttcatgaacatacaagcgcacgcatgtattggaggcaaaagtgtgggtgaagatataagaaagctagaaaatggagttcatgtagtgtcgggaacacctggtagagtttgtgatatgatcaaacgaagaaccctacgtacaagggctattaaactattgattcttgatgaatctgatgagatgttgagccgagggttcaaagatcaaatttatgatgtttaccgacatcttccaccagaacttcaggtttgtttgatatctgctaccctccctcatgaaatattggaaatgacgagcaaatttatgactgatcctataaggatcctcgtgaagcgtgatgaattgactctggagggaattaagcagttttttgtagcagttgaaagggaagagtggaagtttgatacactatgtgatctttacgacacgttgacaatcactcaagctgttattttctgcaatacaaaacgaaaggtcgattggctaactgagaagatgcgtagcaataactttacggtatcctcaatgcatggagatatgcctcagaaggaaagagatgcgattatggctgagtttcgggatggtgcaacccgtgttcttatcactacagatgtttgggccaggggacttgatgttcagcaggtgtctctggtgatcaattacgacctgccaaacaatcgagagctttacatccataggattggacgttctggtcgattcggacgaaagggtgttgctattaatttcgtgaaaagcgacgacatcaagattcttagagacatagagcagtactacagtacccagatcgacgaaatgccaatgaatgtcgcggatctgatatgagaaatgctttcataagtgcttggatcggaacttgaagggtacggttgaacattttccatgttgttggtgtaatcgaatcatctatctagttgcatgtttgtgtgtgattgggtttgtatgctacgcggaggtcgattaactgaatgcttgttgtaacaggttaagcatttaactatcaaaacacagtgattgtcgtgcatttcttcactgttgtatgtatgtgtagttggattgctcaaatttctggagttttatttattattaccaagagttt

SEQ ID NO: 499 - protein, 407 aa, Gossypium hirsutum
MSAAAAATSRATRRMGAEDEKLVFETTEGIEPILSFDQMGLKDDLLRGIYNYGFEKPSAIQQRAVMPIINGRDVIAQAQSGTGKTSMIALTVCQVVDTASREVQALILSPTRELASQTEKVIRTIGDFMNIQAHACIGGKSVGEDIRKLENGVHVVSGTPGRVCDMIKRRTLRTRAIKLLILDESDEMLSRGFKDQIYDVYRHLPPELQVCLISATLPHEILEMTSKFMTDPIRILVKRDELTLEGIKQFFVAVEREEWKFDTLCDLYDTLTITQAVIFCNTKRKVDWLTEKMRSNNFTVSSMHGDMPQKERDAIMAEFRDGATRVLITTDVWARGLDVQQVSLVINYDLPNNRELYIHRIGRSGRFGRKGVAINFVKSDDIKILRDIEQYYSTQIDEMPMNVADLI

SEQ ID NO: 500 - DNA, 1221 bp, Glycine max
atggcaacgacgtcggtggtgccggcgaaccggcgtcgcgcggcgaaccccgcggaggagatggacttcgagacgacggagggcgtgaaggccatcgcaagcttcgaggagatggggatcaaggacgatctgctccgcggaatctaccagtacggcttcgagaagccctccgccattcagcagcgggccgtcacgcccatcattcagggccgtgacgtcatcgctcaggcccaatccggaacggggaaaacgtccatgattgctctcaccgtttgccaggtcgtcgatacctccgtcagagaggttcaggcattgatattgtcaccaacgagggaactggcctcacagactgagaaagttatattggctattggggatttcattaatatacaagctcatgcatgcgttggtggtaaaagtgtgggagaagatataaggaaacttgagtatggagttcatgtggtgtctggaactcctggccgagtttgtgacatgatcaaaaggagaacattgcgcacgagagctatcaagatgctagttcttgatgaatctgatgaaatgttgagcagagggtttaaagatcaaatttatgatgtgtatagatatctcccacccgaccttcaggtttgcttgatttctgctacccttcctcatgaaatactggagatgacaaacaaattcatgacagatccagtaaggatccttgtaaaacgtgatgaattgacattggagggcatcaaacaattttttgttgccgttgaaagggaggaatggaagtttgataccctgtgtgatctttatgataccctcactatcactcaagctgttatattctgtaacactaagcgaaaggtggactggttaactgaaaaaatgcgtaacaataatttcactgtctcatcaatgcatggtgacatgcctcagaaagaaagagatgctattatgggagaatttcgtgctggaacaacccgtgtactaataacaactgatgtttgggcccgtggtcttgatgtacagcaggtttctctagttatcaattatgaccttccaaataatcgtgagctttacattcatcgaattggccgttctggacgttttggaagaaagggtgttgcgataaattttgtgaagagcgatgacatcaagatcttgagagacattgaacaatactacagtactcagattgatgaaatgccaatgaatgttgctgatcttatataa

SEQ ID NO: 501 - protein, 406 aa, Glycine max
MATTSVVPANRRRAANPAEEMDFETTEGVKAIASFEEMGIKDDLLRGIYQYGFEKPSAIQQRAVTPIIQGRDVIAQAQSGTGKTSMIALTVCQVVDTSVREVQALILSPTRELASQTEKVILAIGDFINIQAHACVGGKSVGEDIRKLEYGVHVVSGTPGRVCDMIKRRTLRTRAIKMLVLDESDEMLSRGFKDQIYDVYRYLPPDLQVCLISATLPHEILEMTNKFMTDPVRILVKRDELTLEGIKQFFVAVEREEWKFDTLCDLYDTLTITQAVIFCNTKRKVDWLTEKMRNNNFTVSSMHGDMPQKERDAIMGEFRAGTTRVLITTDVWARGLDVQQVSLVINYDLPNNRELYIHRIGRSGRFGRKGVAINFVKSDDIKILRDIEQYYSTQIDEMPMNVADLI

SEQ ID NO: 502 - DNA, 1609 bp, Gossypium raimondii
cacgaacttaggcaaagcagaggctagacagatgccggcggcggcggcgacgagccgagcgactcgacggatgggagccgaggatgagaagctagtgttcgaaacgacggaaggaatcgagccgatattaagtttcgatcagatgggactaaaagacgatctcctccgtggaatctacaattacggcttcgaaaagccatctgctatccagcagagagccgtcatgccgataatcaatggccgcgacgtcattgcccaagctcagtctggtaccggtaaaacctccatgattgccctcaccgtttgccaagtggttgacacagctagcagagaggttcaagcattgatcttgtcacccacgagggaactggcttcacaaacggagaaagtgatacggacaattggtgatttcatgaacatacaagcgcacgcatgtattggaggcaaaagtgtgggtgaagatataagaaagctagaaaatggagttcatgtagtgtcgggaacacctggtagagtttgtgatatgatcaaacgaagaaccctacgtacaagggctattaaactattgattcttgatgaatctgatgagatgttgagccgagggttcaaagatcaaatttatgatgtttaccgacatcttccaccagaacttcaggtttgtttgatatctgctaccctccctcatgaaatattggaaatgacgagcaaatttatgactgatcctataaggatcctcgtgaagcgtgatgaattgactctggagggaattaagcagttttttgtagcagttgaaagggaagagtggaagtttgatacactatgtgatctttacgacacgttgacaatcactcaagctgttattttctgcaatacaaaacgaaaggtcgattggctaactgagaagatgcgtagcaataactttacggtatcctcaatgcatggagatatgcctcagaaggaaagagatgcgattatggctgagtttcgggatggtgcaacccgtgttcttatcactacagatgtttgggccaggggacttgatgttcagcaggtgtctctggtgatcaattatgacctgccaaacaatcgagagctttacatccataggattggacgttctggtcgattcggacgaaagggtgttgctattaatttcgtgaaaagcgatgacatcaagattcttagagacatagagcagtactacagtacccagatcgacgaaatgccaatgaatgtcgcggatctgatatgagaaatgctttcataagtgcttggatcggaacttgaagggtacggttgaacattttccatggtgttggtgtaatcgaatcatctatctagttgcatatttgtgtgtgattgggtttgtatgctacgcggaggtcgattaactgaatgcttgtcgtaacagagtaagcatttaactatcaaaacacagtgattgtcgtgcatttctcttcactgttgtatgtatttgtagttggattgctcaaatttctggagttttatttattattaccaagagtttgttagggattttaaagggttttgaagtctcatcccacttcttccccatttatttttatggttttggagtttgaatttgttc

SEQ ID NO: 503 - protein, 406 aa, Gossypium raimondii
MPAAAATSRATRRMGAEDEKLVFETTEGIEPILSFDQMGLKDDLLRGIYNYGFEKPSAIQQRAVMPIINGRDVIAQAQSGTGKTSMIALTVCQVVDTASREVQALILSPTRELASQTEKVIRTIGDFMNIQAHACIGGKSVGEDIRKLENGVHVVSGTPGRVCDMIKRRTLRTRAIKLLILDESDEMLSRGFKDQIYDVYRHLPPELQVCLISATLPHEILEMTSKFMTDPIRILVKRDELTLEGIKQFFVAVEREEWKFDTLCDLYDTLTITQAVIFCNTKRKVDWLTEKMRSNNFTVSSMHGDMPQKERDAIMAEFRDGATRVLITTDVWARGLDVQQVSLVINYDLPNNRELYIHRIGRSGRFGRKGVAINFVKSDDIKILRDIEQYYSTQIDEMPMNVADLI

SEQ ID NO: 504 - DNA, 1600 bp, Hordeum vulgare
tgctcctctcctctcctccggcgcgtgccgggtctgtctgctgctccccacgtctgtctgtctccacaccccgagctagctagggtttcgcatcaccgatggcggcggcggcgggcggggcgacgacctcgacgaggcgcgggccgggcggcggccggccgatggacgacgagaacctgaccttcgagacctcggcgggggtcgaggtcgtcggcagcttcgacgccatggggatccgcgaggacctcctccgcggcatctacgactacggcttcgagaagccctccgccatccagcagcgggccgtcatccccatcatcaccggccgcgacgtcatcgcccaggcccagtccggcaccggcaagacctccatgatctccctctccgtatgccaggtcatcgagaccaacgtccacgaggtgcaggcgctgatactgtcgccaactagggagcttgccacacaaacagagagggtcatgcaggctgttggtagcttcatgagcgtctctgtgcacgcctgtgttggtggcaagagtattggggaggatattaggaagctcgagtctggagtgcatgttgtgtcgggaaccccgggcagggtatgtgatatgatcaagagaaggacgttgcgcacaagagccatcaagctcctagtcctggacgaagccgatgagatgttgagcagaggtttcaaggatcagatttatgatgtctacagatatcttcccccagaacttcaggttgttttgatctctgcaactctgccccatgacatcttggagataactagcaagttcatgactgatccagtcaggatccttgtaaaacgtgatgagttgaccctagagggcatcaaacaattttttgttgctgttgagaaagaggaatggaagtttgatacactgtgcgatctttatgatacacttaccattacccaagctgtcattttctgcaacactaagagaaaggtggattggcttactgaaaggatgcgcaccaacaacttcacggtgtcagctatgcatggtgacatgcctcaaaaggaaagggatgcaattatgaatgagttcaggggtggcacgactcgcgtcctgatcacaaccgatgtttgggctcgagggctggatgtccagcaggtctcccttgtcattaattacgatctcccgaacaaccgtgagctttacatccatcggattggtcgctctgggcgttttgggcgcaagggtgtggcgatcaactttgtgcgcaaggacgacatccgtatcctccgggacattgaacagtactacagcacgcagatcgacgagatgcccatgaacgtcgctgatcttatctgagctctggaccgggctctctctttgtcgtcagtgcgtgtggggatttggttgggatgtttggctgtatttgtggtgctgtaacttgagatttcttttgttgctttgggaacatggaagtgtatatattctttcttggattgaccagcccatgtaaaacactcttttgttgtcttctgatttggacgccatgacatacacacactttgttcgtttggattttgatattattagattttgtttcagtgttgaggttaatgccacga

SEQ ID NO: 505 - protein, 412 aa, Hordeum vulgare
MAAAAGGATTSTRRGPGGGRPMDDENLTFETSAGVEVVGSFDAMGIREDLLRGIYDYGFEKPSAIQQRAVIPIITGRDVIAQAQSGTGKTSMISLSVCQVIETNVHEVQALILSPTRELATQTERVMQAVGSFMSVSVHACVGGKSIGEDIRKLESGVHVVSGTPGRVCDMIKRRTLRTRAIKLLVLDEADEMLSRGFKDQIYDVYRYLPPELQVVLISATLPHDILEITSKFMTDPVRILVKRDELTLEGIKQFFVAVEKEEWKFDTLCDLYDTLTITQAVIFCNTKRKVDWLTERMRTNNFTVSAMHGDMPQKERDAIMNEFRGGTTRVLITTDVWARGLDVQQVSLVINYDLPNNRELYIHRIGRSGRFGRKGVAINFVRKDDIRILRDIEQYYSTQIDEMPMNVADLI

SEQ ID NO: 506 - DNA, 1621 bp, Lactuca serriola
cacgtagtggccacgttttggttttcgaaattctatcgagggtttcacttggttcacataagaaccctaaaaccaacaacaggggaaatacgagccacaagaactacgaaaaatctctcatggcgggaacgtcagtggtaccggcgaacagaggacggcggaacacgatggtggatgacgaaaagctggtctttgagacctcgcgcggagtggagccgattatgagctttgaccaaatgggaatcaaagacgatctactccgtgggatttaccaacacggattcgagaagccctcggcaattcaacagagagctgttaggcctatcattgaaggtcgagatgtcattgcccaggctcaatctggtaccggaaaaacctccatgattgcgcttactgtttgccagattgtcgacacagcttcaagagaggtccaagctttgatcttgtcaccaacaagagagcttgcagcacagacagagaaacagatattggctataggcgatttcatcagtatacaagcccatgcatgcattggaggaaaaagtgttggtgaggacattagaaagttagaaaatggagtccatgttgtttctggaacacctgggagagtctgtgacatgatcaagagaagaacattgcgaacaagagccattaaactactaattctcgatgaatctgatgaaatgttgagcagagggtttaaggatcaaatttatgatgtctaccgttatcttccaccagagcttcaggtgtgtttggtgtctgctactcttcctaatgaaatattggagatgaccagtaaattcatgactgatcctgttcgaatcctggtcaaacgtgatgagttgactcttgagggaataaaacaattctttgttgctgtagaaagagaaaactggaagtttgatactctgtgtgatctgtatgatactctcacaatcacacaggctgtaattttctgtaacacaaagcgaaaggtggattggctaactgagaagatgcgtgagaataactttactgtatcggctatgcatggagatatgcctcagaaggagagagatgcaattatggaagagtttcgatctggtgttactcgtgtcttgattacaacagatgtgtgggccagggggttggatgttcaacaggtttctttggtgattaactatgacctcccaaataaccgagagctttatattcatcgtattggtcgatccggtcgatttggacgaaagggtgttgctattaatttcgtgaagacggatgatatcaagattttaagagatatagagcagtactacagtacccaaattgatgaaatgccaatgaatgtggcagatttgatataatggttgtaaactgaaatgagtttgtagtttttactggtgtttttttttttttgagtaatgagtggatcttgctgtaaaacttttgaattgttttgattgtaattgtggacagatcttgaattctttcttgtagggtggtgaaactggaaagtttggtttgtcatgctgaatttgtattgtgaatataagtaagtgtatctgctgttggtcttttatttcatcataattccacgtttgtttgtgttgtgctccgaaaaaacacacaaccacatgac

SEQ ID NO: 507 - protein, 408 aa, Lactuca serriola
MAGTSVVPANRGRRNTMVDDEKLVFETSRGVEPIMSFDQMGIKDDLLRGIYQHGFEKPSAIQQRAVRPIIEGRDVIAQAQSGTGKTSMIALTVCQIVDTASREVQALILSPTRELAAQTEKQILAIGDFISIQAHACIGGKSVGEDIRKLENGVHVVSGTPGRVCDMIKRRTLRTRAIKLLILDESDEMLSRGFKDQIYDVYRYLPPELQVCLVSATLPNEILEMTSKFMTDPVRILVKRDELTLEGIKQFFVAVERENWKFDTLCDLYDTLTITQAVIFCNTKRKVDWLTEKMRENNFTVSAMHGDMPQKERDAIMEEFRSGVTRVLITTDVWARGLDVQQVSLVINYDLPNNRELYIHRIGRSGRFGRKGVAINFVKTDDIKILRDIEQYYSTQIDEMPMNVADLI

SEQ ID NO: 508 - DNA, 1556 bp, Medicago truncatula
  misc_feature (1372)..(1372): n is a, c, g, or t
  misc_feature (1513)..(1513): n is a, c, g, or t
  misc_feature (1520)..(1520): n is a, c, g, or t
  misc_feature (1522)..(1522): n is a, c, g, or t
  misc_feature (1528)..(1529): n is a, c, g, or t
cggccgggggcaaacgtaaggtgtagcttattctacttttctagggcaaacacaaaaaaactcgtctctcaaccaaaccttcttccttcatctcggcggcgatggcgacagcttctgtggttccggcgaatcgccgacgaacggttacggcgaacgaggacatggatttcgaaacaaccgaaggcgtgaaagcaatcggaagctttgaagagatggggataaaagacgatttgcttcgtggaatctaccaatacggatttgagaaaccttctgcgattcaacagcgtgcggttgccccgattattcagggaagggatgttattgctcaggcgcaatctggtactggaaagacctcgatgattgccttgacggtttgtcaggttgttgatacctccgtcagagaagtgcaagctttaattgtgtctccgacaagagaactggcctcacagactgagaaagttatattgacaattggggattttatcaatatacaagcccatgcttgcattggaggaaaaagtgtgggagaagacattagaaaacttgagcatggagttcatgtcgtatctggaactcctggccgagtctgtgacatgataaagaggagaacattgcgcaccagggctatcaagttgctagttctggatgaatctgatgaaatgttgagcagagggtttaaagatcagatttatgatgtgtatagatatctcccaccggatcttcaggtttgccttatttctgctacgctacctcatgagattctggagatgacaaacaagtttatgacagatcctgtgaggatccttgtaaagcgtgatgaattgacattggagggcatcaagcaattttttgttgcagttgaaagggaggaatggaagtttgatactctgtgtgatctatatgatactctcaccattactcaggctgttatattctgtaacaccaagcggaaggttgactggttaactgaaaaaatgcgtaacaataatttcaccgtctcagcaatgcatggtgacatgcctcaaagagaaagagatgccattatgggtgaattccgtgctggaacaacccgagtattaataacaaccgatgtttgggctcgtggacttgatgtacaacaggtttctctagttatcaattatgaccttccaaataatcgagagctctacattcatcggattggtcgttctggacgttttgggcgaaagggtgttgcaataaattttgttaaaagcgatgatatcaagattttgagagatattgagcaatattacagtacccagattgatgagatgccaatgaatgttgctgatcttatataaaaggacaaggcagtatgctgagtggagtgcgtttgtcaaatttgtggtangaattagtgtttgattgtggtttcgttttgataccctctgtgatgttcttctgaaactttttgacatttggtgtattaaaatttttagtgtgctcgactgtaccacagggataatgtttttctttgttgaaatgggttganacttganancatttnnaaattgagttggaatgctttgtccatt

SEQ ID NO: 509 - protein, 406 aa, Medicago truncatula
MATASVVPANRRRTVTANEDMDFETTEGVKAIGSFEEMGIKDDLLRGIYQYGFEKPSAIQQRAVAPIIQGRDVIAQAQSGTGKTSMIALTVCQVVDTSVREVQALIVSPTRELASQTEKVILTIGDFINIQAHACIGGKSVGEDIRKLEHGVHVVSGTPGRVCDMIKRRTLRTRAIKLLVLDESDEMLSRGFKDQIYDVYRYLPPDLQVCLISATLPHEILEMTNKFMTDPVRILVKRDELTLEGIKQFFVAVEREEWKFDTLCDLYDTLTITQAVIFCNTKRKVDWLTEKMRNNNFTVSAMHGDMPQRERDAIMGEFRAGTTRVLITTDVWARGLDVQQVSLVINYDLPNNRELYIHRIGRSGRFGRKGVAINFVKSDDIKILRDIEQYYSTQIDEMPMNVADLI

SEQ ID NO: 510 - DNA, 1523 bp, Nicotiana tabacum
gatttcaacacggtgatacacgttctgttctctctaaagcatttcatcaaacaccatggatggggcggcgactggctctgttattccggcgaacaggaggcggccgccgatggaggaagacagattagtcttcgagacatcaaagggcgtggagcccatagctagtttcgctgagatgggcattaaagatgaacttcttagaggtgtttatcaatacggatttgaaaagccgtccgccattcaacaacgggctgtgctgcctattatatcgggtcgtgatgtcatcgctcaggcccaatccggtaccggtaaaacctccatgattgcactcaccgtttgccaaattgtggataccaaatcttccgaggtacaagcattaattttgtcgcctacgcgggagctcgcagctcaaacagaaaaggtgattttggctattggagattacattaacgttcaggcacatgcatgtattggaggcaaaagcgtacgtgaagatatcagaaaactagagcatggagtacaagtagtctctggaactcctggaagagtctgtgacatgattaaaaggagaactttacgaactaggggtataaaattattgattcttgacgaatctgatgagatgttgagccgtggttttaaggatcagatatatgatgtttacagatatcttccaccggagcttcaggttgtactgatttctgccactcttccaaatgaaattctggagataacaagcaaatttatgacagatcctgttcggattcttgtaaaacgtgatgagttgactttagagggcatcaaacagttctttgtcgcggttgagaaagaagagtggaaatttgatacactttgtgatctttatgatacactcaccatcacccaggctgttattttctgcaacacaaaacgaaaggttgattggctgactagcaagatgcgtgaaaataattttacagtatcatctatgcatggagatatgccacagaaggagagagatgctattatggcagagttccgaggtggcacgactcgtgttctaatcaccacagatgtttgggcaaggggattggatgttcaacaggtgtctctggtgattaattatgaccttccaaacaatagagagctgtacattcatcgcattggtcgctctggtcgttttggtcgaaagggtgttgccataaattttgtgaagagtgatgacattaaaattctgagagacatagagcagtactacagtacccagattgatgaaatgcccatgaacgttgctgatttgatatgaaaggctggagcttccaatccttctgaatatgtctctggtgtggctgcattggtttgccttctgagtggtttgtaccaaggataagtttttgatggcgagaaattggtggatgttctatttattggtactgtgagacatattggctttcttgtgcgtcatattttgttgcgaagtgtaattctggatgactggatgatctgttttaacataggcttgataaatttgtctgacaaaaaaa

SEQ ID NO: 511 - protein, 409 aa, Nicotiana tabacum
MDGAATGSVIPANRRRPPMEEDRLVFETSKGVEPIASFAEMGIKDELLRGVYQYGFEKPSAIQQRAVLPIISGRDVIAQAQSGTGKTSMIALTVCQIVDTKSSEVQALILSPTRELAAQTEKVILAIGDYINVQAHACIGGKSVREDIRKLEHGVQVVSGTPGRVCDMIKRRTLRTRGIKLLILDESDEMLSRGFKDQIYDVYRYLPPELQVVLISATLPNEILEITSKFMTDPVRILVKRDELTLEGIKQFFVAVEKEEWKFDTLCDLYDTLTITQAVIFCNTKRKVDWLTSKMRENNFTVSSMHGDMPQKERDAIMAEFRGGTTRVLITTDVWARGLDVQQVSLVINYDLPNNRELYIHRIGRSGRFGRKGVAINFVKSDDIKILRDIEQYYSTQIDEMPMNVADLI

SEQ ID NO: 512 - DNA, 1574 bp, Ocimum basilicum
tatccggcgacactgattgaagaatcactatggcggctgcggggattcagagaggcggcgggggtcgccgagctatggaggaagacgacgcgaagcttgtgttcgagacgtcgaaaggggttgagccaatcatgagttttgacgagatgggaattaaagatgatctcctccgaggaatctacaattacggcttcgagaagccttctgctattcaacagcgtgcagttcttccgattatctccggtcgcgacgtcattgctcaggcgcaatcgggtaccggcaaaacctccatgattgccctcactgtttgccagattgtcgacaccaagtcatccgaggttcaagccttgattttgtctcctacaagggagttggcttcccaaacggagaaggtgatattggctattggtgactatatcaatgtacaagctcatgcttgcgttggaggcaaaagcgtgggtgaagatataagaaaactggagcatggagttcaggtggtgtctggcactcctggtagagtttgtgacatgattaaaagaagaaccttaaggactagggcaatcaaattattgattctggacgagtctgatgaaatgctgagcagagggtttaaggatcagatttatgatgtctacagataccttccacctgagctgcaggttgtcttgatctccgccaccctcccaaatgaaatattggagattacgagcaaattcatgactgatccagtccgaatcctagtaaagcgtgatgaattgactttggagggtatcaagcaattctttgttgcagtagaaagagaagaatggaaatttgatacactctgcgatttatatgacacccttaccataacccaggctgttatattttgtaacacaaagcgtaaggttgattggctgacagcaaaaatgcgtgagaataactttactatttcatccatgcacggagatatgccacagaaggagcgggatgcaattatggctgaattcaggtctggccagactcgtgtgctcatcacaacagatgtttgggctaggggattggacgttcaacaggtttctctggtgattaattacgatcttcctaacaaccgagagctctacattcatagaattggacgatccggtcgatttgggagaaagggtgttgccataaactttgttaaaagtgatgacatcaagatcctgagagatattgagcaatattatagcacacagatcgatgaaatgcctatgaatgtagctgatttgatataacagccattctgtctgtttgaaggcgtgtgttgtgtgtggcgtttgacttggagggctatggttgcttatagctgttggcacacctttatggtgagagacgattggaatgatggtggcgtcttagtttcagcgagctgtgtgactaattttgaatgaagatttaggactggtttattagaggtttctggaattcttggtggtgaggagacaatcgaatttgtgttggcgtgtggtttgggtgttgaagggttattgtattatatctcaaagcaccaagtttgttgatgacgctttttggtacattggattgttttcctc

SEQ ID NO: 513 - protein, 408 aa, Ocimum basilicum
MAAAGIQRGGGGRRAMEEDDAKLVFETSKGVEPIMSFDEMGIKDDLLRGIYNYGFEKPSAIQQRAVLPIISGRDVIAQAQSGTGKTSMIALTVCQIVDTKSSEVQALILSPTRELASQTEKVILAIGDYINVQAHACVGGKSVGEDIRKLEHGVQVVSGTPGRVCDMIKRRTLRTRAIKLLILDESDEMLSRGFKDQIYDVYRYLPPELQVVLISATLPNEILEITSKFMTDPVRILVKRDELTLEGIKQFFVAVEREEWKFDTLCDLYDTLTITQAVIFCNTKRKVDWLTAKMRENNFTISSMHGDMPQKERDAIMAEFRSGQTRVLITTDVWARGLDVQQVSLVINYDLPNNRELYIHRIGRSGRFGRKGVAINFVKSDDIKILRDIEQYYSTQIDEMPMNVADLI

SEQ ID NO: 514 - DNA, 1253 bp, Ostreococcus lucimarinus
atggcgaaagacgcgggcaagcgaaccgcgacgagctacgacgcggatgaaaagatatcgttcgagacgtcggaagggatcgaaccgcgcgcgacgttcgacgcgatgggaattcgtgaggatttgctgcgcgggctgtactcgtacgggttcgaaaagccgagcgcgattcaacagcgagcggtggtgccgataatatccggacgggacgtgatcgcgcaggcgcagagcgggacggggaagacgtcgatgatatcgctggcgctgtgtcagatgttggacacgacatcgagggaggtgcagggattggtgctgtcgccgacgcgagagttggcggtgcagacggagaagacggcgctgtcgctggggaattttatgaacgtgcaagtgcacgcgtgcatcgggggacggtcgatcggggatgacattcgtaaattagattacggctgtcacatcgtcagtgggacgccgggacgggtgttcgatatgataaagcggcggaatttacgcacgcgcgggattaagattttggtcctcgacgaggcggatgaaatgttgaataaagggttcaaggaacagatttacgatgtgtatagatacttgccgccggaaacgcaggtggtgttggtgagcgccacgctgccgaacgaagtgttggagatgacgagcaagtttatgacggatccgatgcgcatcttggtcaagcgcgacgaattaacgcttgaaggtattaagcagttcttcgtcgccgtcgaacgcgaggaatggaagttcgacacgctttgcgatttgtacgacacgctgacgatcacgcaagcggtgatcttttgcaacacgaagaagaaggtggattggctcacggagaaaatgcgacagaacaacttcacagtctccgccatgcacggcgacatgcctcaaaaggagcgcgaggaaatcatgaacgagttccgaggcggtacgacgcgcgtattgatcacaaccgacgtctgggcgcgcggtatcgacgttcaacaagtgtctttagtcatcaactatgatcttccgggcaaccgtgaaaactacatccatcgcatcggtcgctcggggcgatacggacgcaagggcgtcgctatcaacttcgtcaaggcagacgacgtgcgtgcgctcagagatatcgaacagtactattccacgcaaatcgacgaaatgcccatgaacgtggccgacttgatttagaagaaacccacgtgtaacgagaatcgtccaaaccgcgc

SEQ ID NO: 515 - protein, 404 aa, Ostreococcus lucimarinus
MAKDAGKRTATSYDADEKISFETSEGIEPRATFDAMGIREDLLRGLYSYGFEKPSAIQQRAVVPIISGRDVIAQAQSGTGKTSMISLALCQMLDTTSREVQGLVLSPTRELAVQTEKTALSLGNFMNVQVHACIGGRSIGDDIRKLDYGCHIVSGTPGRVFDMIKRRNLRTRGIKILVLDEADEMLNKGFKEQIYDVYRYLPPETQVVLVSATLPNEVLEMTSKFMTDPMRILVKRDELTLEGIKQFFVAVEREEWKFDTLCDLYDTLTITQAVIFCNTKKKVDWLTEKMRQNNFTVSAMHGDMPQKEREEIMNEFRGGTTRVLITTDVWARGIDVQQVSLVINYDLPGNRENYIHRIGRSGRYGRKGVAINFVKADDVRALRDIEQYYSTQIDEMPMNVADLI

SEQ ID NO: 516 - DNA, 1212 bp, Ostreococcus RCC809
atgccgtcggaacgatcgcgcgcggtgacggatcacgatgacgatgaaaagatcgcgttcgaaacctcgagagggatcgaatcgaaacccacgttcgacgccatgggcattcgcgaggacctcttgcgcgggttgtactcgtatgggtttgaaaaaccgagcgcgattcaacagcgcgccgtcgtgcccatcatctcgggtcgagacatcatcgcgcaggcgcagagcgggacggggaagacgtcgatgatctcgttggcgttgtgtcagatgctcgacgtgacgacgcgcgaggtgcaagggttggtgttgtcgccgacgagggaattggcggtgcagacggagaagacggcgctggcgttggggaattttatgaatgtacagacgcacgcgtgcataggtggacgatcgatcggtgaggatatacggaaattggatcacgggtgtcacgtcgtgagcgggacgccgggacgcgtcttcgacatgatcaagagacgaaaccttcgcacgcgcgggatcaaggtgctcgtcctggacgaggcggacgagatgttgaataaggggtttaaagaacagatttatgacgtgtacaggtatttaccgccggagacgcaggtggtgttggtgagcgcgacgcttccgaatgaggttttggagatgacgagcaagtttatgacggatccgctgcgcattctcgtcaaacgggacgaattgacgctcgagggaatcaagcaattcttcgtcgccgtggagcgagaggagtggaagtttgacacgctgtgtgatctgtacgatacgctcaccatcacgcaggctgtcatcttttgcaacacaaagaaaaaggtggattggctcacggagaagatgcgtcagaataatttcaccgtctcggcgatgcacggagacatgccgcaaaaggagcgagaggagattatgaacgagtttaggggtggaacgacgcgggtattgatcaccaccgacgtctgggcgcgagggatcgacgtgcaacaggtgtctttagtcatcaactacgatttaccggtaaatcgagaaaattacattcacagaatcggtcgttcgggacgatacggacgcaagggcgtcgccatcaatttcgtcaaggcggaggacgtgcgcgcgctcagggatatcgaacagtattattcgacgcaaatcgacgagatgcccatgaacgtggccgatttgatttga

SEQ ID NO: 517 - protein, 403 aa, Ostreococcus RCC809
MPSERSRAVTDHDDDEKIAFETSRGIESKPTFDAMGIREDLLRGLYSYGFEKPSAIQQRAVVPIISGRDIIAQAQSGTGKTSMISLALCQMLDVTTREVQGLVLSPTRELAVQTEKTALALGNFMNVQTHACIGGRSIGEDIRKLDHGCHVVSGTPGRVFDMIKRRNLRTRGIKVLVLDEADEMLNKGFKEQIYDVYRYLPPETQVVLVSATLPNEVLEMTSKFMTDPLRILVKRDELTLEGIKQFFVAVEREEWKFDTLCDLYDTLTITQAVIFCNTKKKVDWLTEKMRQNNFTVSAMHGDMPQKEREEIMNEFRGGTTRVLITTDVWARGIDVQQVSLVINYDLPVNRENYIHRIGRSGRYGRKGVAINFVKAEDVRALRDIEQYYSTQIDEMPMNVADLI

SEQ ID NO: 518 - DNA, 1641 bp, Oryza sativa
gtccacccctcacctccttcccccatctcttctctagttctcttctctttctagggtttcgtctcccccaatggcggcggccaccacgtcgcggcgcggcccgggcgccatggacgacgagaacctcaccttcgagacctccccgggggtcgaggtcatcagcagcttcgaccagatggggatccgcgacgacctcctccgcggcatctacgcctacggcttcgagaagccctccgccatccagcagcgcgccgtcctccccatcatcagcggccgcgacgtcatcgcccaggcccagtccgggaccggcaagacctccatgatctcgctctccgtctgccagatcgtagacaccgccgtccgtgaggtgcaggctttaatactgtcaccaactagagaacttgctgcacaaacagaaagagttatgctggctatcggtgacttcatcaatatccaagtgcatgcttgtattggtggcaaaagtattggtgaggatattagaaagcttgagcacggagtgcatgtggtgtcaggaacacctggcagagtctgtgatatgatcaagagaaggaccttgcgtacaagagccattaagctcctaattctggatgaagctgatgagatgttgggcagaggctttaaggatcagatatatgatgtgtacagatacctccctccagaactccaggtttgcttgatctccgcaactctgcctcacgagatcttggaaatgaccagcaagttcatgactgatccagttcggatccttgtgaagcgtgatgaattgactctagagggcatcaaacaattctttgttgctgttgagaaagaagaatggaagtttgacacgctttgtgatctttatgatacactgacaatcacccaagctgtcattttctgcaacacaaagagaaaggttgattggcttacggaaagaatgcgcagcaataacttcacagtatcagctatgcatggcgacatgcctcaaaaggaaagggatgccattatgggtgaattcaggtctggtgcaacccgtgttctaatcacgacagatgtgtgggctcgaggcctcgatgttcagcaggtctctcttgtcataaattatgatctcccaaataatcgtgaactttacatccatcgcattggtcgctctggacgttttggtcgcaagggtgtggccatcaattttgtcaaaaaggaagacatccgtatcctgagagatatcgagcagtactacagcacgcagattgatgaaatgccaatgaatgttgctgatctaatttgagtgctggagtggcgctaccatgtttgatcatctggtctggcaacaactgagcttgtttgttgtgattttggttgacatgctttgccgtgactgtattgctatggactttaaagggttgcgagtctaatactagtgattggtttcgttcccctctcttgtgacatgatctgtatataattttagtgccagctcatgtaacactatgattgcatttctgctcagaacatgagacttgttcgttatatttattgccacaaggatttgatgatgattttctcgttgaaggtgtggtggtatttagatcttctgtgtgttgtgatctcaaatgtttttgtcaaagtgtttcatttgctcca

SEQ ID NO: 519 - protein, 404 aa, Oryza sativa
MAAATTSRRGPGAMDDENLTFETSPGVEVISSFDQMGIRDDLLRGIYAYGFEKPSAIQQRAVLPIISGRDVIAQAQSGTGKTSMISLSVCQIVDTAVREVQALILSPTRELAAQTERVMLAIGDFINIQVHACIGGKSIGEDIRKLEHGVHVVSGTPGRVCDMIKRRTLRTRAIKLLILDEADEMLGRGFKDQIYDVYRYLPPELQVCLISATLPHEILEMTSKFMTDPVRILVKRDELTLEGIKQFFVAVEKEEWKFDTLCDLYDTLTITQAVIFCNTKRKVDWLTERMRSNNFTVSAMHGDMPQKERDAIMGEFRSGATRVLITTDVWARGLDVQQVSLVINYDLPNNRELYIHRIGRSGRFGRKGVAINFVKKEDIRILRDIEQYYSTQIDEMPMNVADLI

SEQ ID NO: 520 - DNA, 1637 bp, Oryza sativa
atactgacagcggtagcatccacaggcaggaagtctccccacccacgacgaccacccccatctccttcccctttctagggtttcgcttcgtctcccccaatggcggcggccaccacgtcccggcgcggccccggcgccatggacgacgagaacctcaccttcgagacctcccccggggtcgaggtcatcagcagcttcgaccagatggggatccgcgaggacctcctccgcggcatctacgcctacggcttcgagaagccctccgccatccagcagcgcgccgtcctccccatcatcagcggccgcgacgtcatcgcccaggcccagtccggaaccggcaagacctccatgatctcgctctccgtctgccagatcgtcgacaccgccgtccgagaggttcaggccttgatactctcaccaactagagaacttgctgcacaaacagaaagagttatgctggccattggtgattacatcaatatccaagtgcatgcttgtattggtggcaaaagtattggtgaggatattagaaagcttgagcatggagtgcatgttgtgtcaggaacacctggcagagtctgtgatatgatcaagagaaggaccttgcgtacaagagccattaagctcctaattctggatgaagccgatgagatgttgggcagaggctttaaggatcagatatatgatgtctacagatatctacccccagagctccaggtttgcttgatctccgcaactctgccacatgagatcttggaaatgaccagcaagttcatgactgacccagtccggatccttgtaaagcgtgatgaattgaccctagagggcatcaaacaattctttgttgctgttgagaaagaagaatggaagtttgatactctttgtgatctttatgatacactgacaatcacccaagctgtcattttctgcaacacgaagagaaaggttgattggcttacagaaagaatgcgcagcaataacttcacggtatcagctatgcatggtgacatgcctcaaaaggaaagggatgccattatgggtgaattcaggtctggtgcaacccgtgttctaattacgacagatgtgtgggctcgaggcctggatgttcagcaggtctctcttgtcataaactatgatcttccaaataatcgtgaactttacatccatcgcattggtcgctctggacgttttggtcgcaagggtgtggccatcaattttgtcaaaaaggaagacatccgtatcctgagagatattgagcagtactacagcacacagattgatgaaatgccaatgaatgttgctgatctaatttgagtgcttgagtggcacaatcatgtttttgatcatctggtctggcaacaagtgagcttgtttgttgtgattttggttgacatgttttgccgagactgttgctgtgaacctaaaaagggttgcgagtctaacactagtgattggtttcgtttcctctttggcttgtggcatgatctgtatatattttagcgccagctcatgtaacactattattgcatttcttctctgaacgcgtgactttgttaactatattcatggcaacaaggatttgatgttggtttctcgttgatgatgtggtggcatttagatctctgtgttgtgacctc

SEQ ID NO: 521 - protein, 404 aa, Oryza sativa
MAAATTSRRGPGAMDDENLTFETSPGVEVISSFDQMGIREDLLRGIYAYGFEKPSAIQQRAVLPIISGRDVIAQAQSGTGKTSMISLSVCQIVDTAVREVQALILSPTRELAAQTERVMLAIGDYINIQVHACIGGKSIGEDIRKLEHGVHVVSGTPGRVCDMIKRRTLRTRAIKLLILDEADEMLGRGFKDQIYDVYRYLPPELQVCLISATLPHEILEMTSKFMTDPVRILVKRDELTLEGIKQFFVAVEKEEWKFDTLCDLYDTLTITQAVIFCNTKRKVDWLTERMRSNNFTVSAMHGDMPQKERDAIMGEFRSGATRVLITTDVWARGLDVQQVSLVINYDLPNNRELYIHRIGRSGRFGRKGVAINFVKKEDIRILRDIEQYYSTQIDEMPMNVADLI

SEQ ID NO: 522 - DNA, 1215 bp, Ostreococcus taurii
atggcgcgaggtgacgacgacgaccgggtggtggatcgcgatgaacacgagaacgtgtcgtttgaggtgtccaagggaatcgcgagacacgcgacgttcgatgcgatgggaattcgtgaggatttgttgagaggtttgtactcgtacgggtttgaaaagccgagcgcgattcaacagcgcgcggtggtgccgatcatttcgggtagagatgtgatcgcgcaggcgcagagtggaacggggaagacgtctatgatttcgctggcgctgtgtcagatgctggacacgacgtcgagggaggtgcaggggttggtgctgtcgccgacgagagagttggcggtgcagacggagaagacggcgctcgcgctcgggaactttatgaacgtgcaagtgcacgcgtgcatcgggggtaggtcgatcggtgaggacatcagaaagctagattacggctgtcacatcgtgagcgggacgccggggcgtgttttcgacatgatcaagaggcgtaacttgcgaacgcgcgggataaagattttggtcctggacgaggcggacgaaatgttgaacaaggggttcaaggaacaaatttacgacgtgtacagataccttccgccggagacgcaggtggtcctagtgagtgccacgctaccgaatgaggttttggagatgaccgggaagttcatgactgatccgctgcgcatcttggtgaagagagacgagctcacgctagagggtatcaagcagttttttgtcgccgtcgagcgcgaggagtggaaattcgatactctgtgcgacttgtacgataccctgaccatcacccaggctgtgatcttctgcaacacgaagaagaaagtggattggctgacagagaagatgcgtcaaaacaactttactgtctctgcgatgcacggcgacatgcctcaaaaggagcgcgaagagatcatgaatgaattccgcggcggaaccacgcgcgtgttgataaccaccgacatgtgggcgcgcggtatcgatgttcagcaagtatccttggtgatcaactacgatttgccgggaaatcgtgaaaactacattcatagaatcggtcgctcgggtcgttatggtcgcaagggtgtggccatcaatttcgtgaaggaggaggacgtccgagcgttgcgcgacatcgagcaatattattccacgcaaattgatgagatgccgatgaacgtggctgatatgatttag

SEQ ID NO: 523 - protein, 404 aa, Ostreococcus taurii
MARGDDDDRVVDRDEHENVSFEVSKGIARHATFDAMGIREDLLRGLYSYGFEKPSAIQQRAVVPIISGRDVIAQAQSGTGKTSMISLALCQMLDTTSREVQGLVLSPTRELAVQTEKTALALGNFMNVQVHACIGGRSIGEDIRKLDYGCHIVSGTPGRVFDMIKRRNLRTRGIKILVLDEADEMLNKGFKEQIYDVYRYLPPETQVVLVSATLPNEVLEMTGKFMTDPLRILVKRDELTLEGIKQFFVAVEREEWKFDTLCDLYDTLTITQAVIFCNTKKKVDWLTEKMRQNNFTVSAMHGDMPQKEREEIMNEFRGGTTRVLITTDMWARGIDVQQVSLVINYDLPGNRENYIHRIGRSGRYGRKGVAINFVKEEDVRALRDIEQYYSTQIDEMPMNVADMI

SEQ ID NO: 524 - DNA, 1412 bp, Physcomitrella patens
atggcagtgggagaacacggtgagaatctcgtatttgagacgagcgcgggcgtggaagtcatttccagcttcgatcagatgggtattcgggaggacctgttgcgaggcatttatgcttacgggtttgagaagccgtccgctattcaacagcgagcagtgatgcctattataagtggccgggatgctatagcccaagcgcagtctggaacagggaaaacctctatgattgccctaaccgtttgtcaaatgattgacattgcaacccgtgaggtgcaagctcttatattgtcacccaccagagagcttgctgctcagacggagaaggtgattctcgcaatcggcgacttcatgaatgttcaagctcatgcttgcattggggggaagagcattggggaagatatccggaagcttgaatatggtgtacatgttgtatctggaactcctgggagagtttatgatatgataaagagaaggacgttgcggacgcggtctatcaagctcctgatcttggatgaatcggatgaaatgctcagcagaggattcaaggaccagatttacgatgtttatcgttatctgccccctgagttgcaggttgtattagtgtctgcaactttgcctcatgaaattttggaaatgacgaacaagttcatgactgaccctgtacgaatcttggtgaaacgtgatgagttgactctggagggaataaaacaattttttgtggccgtcgaaagagaagaatggaagttcgatacattgtgtgatctctatgacacacttacaattacccaggctgttattttttgcaacacaaagcggaaggtggactggctgacagaaaagatgagaagtaacaattttaccgtgtctgcaatgcacggcgacatgccccaaaaggaacgtgatgcaatcatggccgagtttcggtctggcactacacgggttctcattacaacagacgtctgggctcgtggtcttgatgtgcaacaagtctctttggtaatcaactatgatcttcccaataaccgtgaattgtacattcatcgtattggtcgctcagggcgatttgggcggaagggtgtagctattaactttgtaaggagcgatgacatccgaattttgcgagacatagagcagtactacagtacccaaatcgatgaaatgcctatgaatgtagctgatttaatatgaggagtcagggataacgttagcgttgctaaaaggggcggattaaattcccaggcttataactaatcatctgcttttgtaaagtagacttcccgaaagcccttgctttcttaatagcttagaaactgttgataaggtttttggttagacgacctttcgcgtcttatgtcttctggtgaatttgtagttcttgccatttttcttgtatgaattaaacttttggaagc

SEQ ID NO: 525 - protein, 395 aa, Physcomitrella patens
MAVGEHGENLVFETSAGVEVISSFDQMGIREDLLRGIYAYGFEKPSAIQQRAVMPIISGRDAIAQAQSGTGKTSMIALTVCQMIDIATREVQALILSPTRELAAQTEKVILAIGDFMNVQAHACIGGKSIGEDIRKLEYGVHVVSGTPGRVYDMIKRRTLRTRSIKLLILDESDEMLSRGFKDQIYDVYRYLPPELQVVLVSATLPHEILEMTNKFMTDPVRILVKRDELTLEGIKQFFVAVEREEWKFDTLCDLYDTLTITQAVIFCNTKRKVDWLTEKMRSNNFTVSAMHGDMPQKERDAIMAEFRSGTTRVLITTDVWARGLDVQQVSLVINYDLPNNRELYIHRIGRSGRFGRKGVAINFVRSDDIRILRDIEQYYSTQIDEMPMNVADLI

SEQ ID NO: 526 - DNA, 1194 bp, Physcomitrella patens
atggggcgagaggagcttgaggaaggggagaaccttgtatttgagaccagtgcaggtgtggaggtcatttctagctttgatcagatgggtatcagggaggacctgttgcgaggtatttatgcatatggatttgagaaaccgtccgctattcagcagcgagcagtgatgcctattataagtggtcgggatgctatcgctcaagcgcagtctggcacaggaaaaacctcaatgattgccctggctgtctgtcaaatgattgatactgcaacccgtgaggtgcaggccctcatattgtcacccaccagagagcttgctgctcaaacggagaaagtgatccttgctattggtgacttcatgaacgttcaagctcatgcttgcattggaggcaagagcattggagaagatatccggaagcttgagtatggtgtacatgtggtgtctgggactcctgggcgagtctatgatatgattaagagaaggacgctgaggactcggtcaattaagctcctgattctggatgaatcggatgaaatgcttagcagaggtttcaaggatcagatttatgatgtttatcgatatctaccccctgaattacaggttgttttagtatcagcaactctgccccatgagattttggagatgacaaacaagttcatgacggatcctgttcgaattctggtgaaacgtgatgagttgactttggagggaattaaacagttttttgtggccgttgagagggaagaatggaagttcgatacattgtgtgatctatacgatacacttacaattactcaggctgtaattttctgcaataccaagcggaaggtcgactggctaacagagaaaatgagaagtaacaactttactgtatctgcaatgcatggtgacatgccccagaaagaacgtgatgcaatcatggctgagttccgatctggcaccactcgggttctgattacaacagatgtctgggctcgtggcctcgatgtacaacaggtttctttggttatcaactacgatcttcccaacaaccgggagctatatattcatcgtattggtcgctcaggacgatttgggcggaagggcgtggctattaattttgtaagaagtgacgatatccgaattttacgagatatagagcagtattacagcactcaaattgatgaaatgccaatgaacgtagctgacttgatttaa

SEQ ID NO: 527 - protein, 397 aa, Physcomitrella patens
MGREELEEGENLVFETSAGVEVISSFDQMGIREDLLRGIYAYGFEKPSAIQQRAVMPIISGRDAIAQAQSGTGKTSMIALAVCQMIDTATREVQALILSPTRELAAQTEKVILAIGDFMNVQAHACIGGKSIGEDIRKLEYGVHVVSGTPGRVYDMIKRRTLRTRSIKLLILDESDEMLSRGFKDQIYDVYRYLPPELQVVLVSATLPHEILEMTNKFMTDPVRILVKRDELTLEGIKQFFVAVEREEWKFDTLCDLYDTLTITQAVIFCNTKRKVDWLTEKMRSNNFTVSAMHGDMPQKERDAIMAEFRSGTTRVLITTDVWARGLDVQQVSLVINYDLPNNRELYIHRIGRSGRFGRKGVAINFVRSDDIRILRDIEQYYSTQIDEMPMNVADLI

SEQ ID NO: 528 - DNA, 1613 bp, Pisum sativum
aattcttcacgagcaaaaatcaaaaacccaactttcccctttctatctcctctcatcaaccaaatacagctcggcggcgatggcgacaacttctgtggtgccggcaaatcgtgggcgaacggttatctccaatgaggatatggactttgagacgacggaaggtgtgaaggcgattgcgaccttcgaagggatggggataaaagaagatttgctgcgtggaatctacgcatacggtttcgagaaaccatcggcgattcaacagcgtgccgttgcgcctatcattcagggacgtgatgttattgctcaagctcaatctggaaccggaaagacgtccatgattgcgcttactgtttgccaggttgttgatacatccgtcagagaagtgcaagctttaattgtgtctccaacaagagaattggccacacagactgaaaaagttatattggctattggagatcatattaatatacaagcacatgcttgcattggaggcaaaagtgtgggagaagatattaggaaacttgagcatggagttcacgtggtgtctggaactcctgggcgagtctgtgacatgataaaaaggagaacattgcgtacaagagctatcaagttactagttctggatgagtctgatgaaatgttgagcagaggatttaaagatcaaatttatgatgtgtatagatatctcccacccgatcttcaggtttgcttgatttctcgtacgctacctcatgaaattctggagatgacaaacaagtttatgacagatccagtgaggatccttgtcaaacgtgatgaattgacattggagggcatcaagcaattttttgttgcggttgaaaaggaggattggaagtttgatactctgtgtgtgatctttatgatactctcaccatcactcaagctgttatattctgtcaacaccaagcgaaaggtggactggttaactgaaaaaatgcgtaacaataatttcactgtctcatcaatgcacggtgacatgcctcaaaaagaaagagatgcaattatgggagaatttcgtgctggaacaacccgagtattgataacaactgatgtttgggctcgtggccttgatgtacaacaggtttctctagttattaattatgaccttccaaataatcgagagctgtacattcatcggattggtcggtctggacgttttggacgaaagggtgttgcaataaattttgttaaaagcgacgatatcaagatcttgagagatattgagcagtattatagtacccagattgatgagatgccaatgaatattggtgatcttatataaaagggcatgcagtttgcagggtggagtgggttgtgataggaattagcgtttaaatgtggttttgttttgatactttcaagatcttctgaagacttttcaatttgtctaatagaattttaactgtgtgattgtaccatatacataattattttcttggctgatatggttgagttcaatctgtaaattgttttgcaatgctgtccatcatcttacattcaatgttgaatgtctaatttttttatgactcaaatgacacctgatgtttttgactttgttgattagtttgctaatttatgtctgatattcatat

SEQ ID NO: 529 - protein, 407 aa, Pisum sativum
MATTSVVPANRGRTVISNEDMDFETTEGVKAIATFEGMGIKEDLLRGIYAYGFEKPSAIQQRAVAPIIQGRDVIAQAQSGTGKTSMIALTVCQVVDTSVREVQALIVSPTRELATQTEKVILAIGDHINIQAHACIGGKSVGEDIRKLEHGVHVVSGTPGRVCDMIKRRTLRTRAIKLLVLDESDEMLSRGFKDQIYDVYRYLPPDLQVCLISRTLPHEILEMTNKFMTDPVRILVKRDELTLEGIKQFFVAVEKEDWKFDTLCVIFMILSPSLKLLYSVNTKRKVDWLTEKMRNNNFTVSSMHGDMPQKERDAIMGEFRAGTTRVLITTDVWARGLDVQQVSLVINYDLPNNRELYIHRIGRSGRFGRKGVAINFVKSDDIKILRDIEQYYSTQIDEMPMNIGDLI

SEQ ID NO: 530 - DNA, 1878 bp, Pinus taeda
ttttttttctcgacacaacaggctgccacaacatgatgtatgtcgctgcaacgaccgttagaccatagctgatagctgatttggtccacgtatgcactcaaatgctagcctaaaagggcatttgaacaaacgtttaattatggttactgaagcttcacgattgcaaccgcaggaaaagggaaacacagagttcttagggacagctatcgatctctggcgagctatcttgtgttgagggtagatttgcgggcgctggaaacaaagggcagggaaggattcttcctttctgcatctataccaaaaatggctaccattgcggtcggcggtaggaaccgcaacaatggacggaacgcggatgttgatgaaaacctagtatttgaaacaagtcctggagtagaagtaatcgggagttttgatcagatgggtatccgtgacgaccttcttcgaggtatataccaatatggcttcgagaaaccctcagctattcagcagagagcggtcatgcccatcatcaacggcagagatgttattgcgcaggcacagtctgggacgggaaagacctccatgattgccctcgctgtctgccagataattgatatctccatccgagaggttcaagctttaattgtatcacctacaagagaacttgcagctcaaacagagaaagtgattcttgctataggagatttcataaatgttcaagctcatgcatgtattggtggcaagagtattggagaggacatcagaaaattggaatatggtgttcatgtcgtatcaggaacaccaggaagagtatgtgatatgatcaagcgcaggactttaaggactagagctgtaaaactacttgttcttgatgaatctgatgagatgttgagcaggggattcaaagaccagatatatgatgtttatcgataccttccaccagagcttcaggttgtcctgatatcagcaactttgccacatgagattttggagattacaaacaaattcatgactgatcctgtaagaatccttgtcaaacgtgatgaattgacactggagggcatcaaacaattttttgtggctgttgaaagagaggagtggaagtttgacaccctatgtgatctatatgatacacttactattactcaggctgtcatattttgcaataccaaaagaaaggttgattggttgacagaaaagatgcgaagcaataatttcactgtgtcttctatgcatggagacatgccacaaaaagaacgtgatgcaattatggcagaatttcgtgcaggcacaacccgtgttttaatcacaacagatgtttgggctcgtggtcttgatgttcagcaggtttccttggtgataaactatgatcttcccaacaatcgtgaactttacattcatagaattggtcgctcaggtcgtttcggtcgaaagggtgttgcaataaattttgttcgaaatgatgatattaggatactaagagatattgagcagtattacagtactcagatagatgaaatgcccatgaatgtggcggatctgatctaaataatgcaataattccagcatgtaatattagctacaacaagagtcctgatgcctgcttaattaggacatgttaaacttcccctgtatttgcagtagctgtgctacatttgcttcaaagaatgttttgtagtggcaagcagagtgtctctcggtgttgtgcctgccagatgttgtatacttaaaatttcatgtccaacgtgcttatatattttatagtctgtcctgtaagcttctgagtggagcagtttaacattgacagcacgaaaatgaatttgcttgtattcttttataatattgacaggctgcaaagtttgacatcatcgttaatcagtttaaaggtttgtgctt

SEQ ID NO: 531 - protein, 408 aa, Pinus taeda
MATIAVGGRNRNNGRNADVDENLVFETSPGVEVIGSFDQMGIRDDLLRGIYQYGFEKPSAIQQRAVMPIINGRDVIAQAQSGTGKTSMIALAVCQIIDISIREVQALIVSPTRELAAQTEKVILAIGDFINVQAHACIGGKSIGEDIRKLEYGVHVVSGTPGRVCDMIKRRTLRTRAVKLLVLDESDEMLSRGFKDQIYDVYRYLPPELQVVLISATLPHEILEITNKFMTDPVRILVKRDELTLEGIKQFFVAVEREEWKFDTLCDLYDTLTITQAVIFCNTKRKVDWLTEKMRSNNFTVSSMHGDMPQKERDAIMAEFRAGTTRVLITTDVWARGLDVQQVSLVINYDLPNNRELYIHRIGRSGRFGRKGVAINFVRNDDIRILRDIEQYYSTQIDEMPMNVADLI

SEQ ID NO: 532 - DNA, 1794 bp, Pinus taeda
cggccggggggggatcgatcgctgcatctctcatcaaaacaccttgcgttcgatttttgtaatcagagcgaggggaaacacaagacgagtattgatatcgatctcttctggtgatttgttggcgatcaattggttgtgccggtggtggtggtcgtggtggtgctggttgaagggttagggttttttctgttctgttatttttcgtaggtgtgtctgttttagaatcaatggctgccgcaggcggcagtaggaaccgtaacaacaacaatgtagggcggaaccctaatgcagttaacgatgaaaacctaatattcgaaacgagtgcgggagtggaagcagtctccagttttgatcagatgggcatccgtgacgacctccttcgaggtatttaccaatatggattcgagaagccttcggccattcagcagagagcagtgatgcctatcatcaatggcagagatgttattgcgcaggcccagtctggtactggaaagacctccatgattgccctcaccgtctgtcagataatcgacacctccatacgagaggttcaagctttaattgtgtcgcctacacgagaacttgcggctcaaacagagaaagtgatacttgccataggagatttcataaatgttcaagctcatgcatgtatcggcggtaagagtattggagaggatatcagaaaactggaatatggggttcatgtggtatcaggaacgccaggaagagtgtgtgatatgatcaaacgcaggaccctaaggaccagagctattaaactacttgttctcgatgaatctgatgaaatgttgagcaggggattcaaagaccagatttatgatgtgtatcggtatcttccaccagagctgcaggttgtcctgatatcagcaactttaccgcatgagattttggagatgacaaataaattcatgactgatccagtaaggatccttgtcaaacgtgatgagttgacactggagggaattaaacaattttttgtggctgttgaaagagaggagtggaagtttgacaccctatgtgatctgtatgacactcttaccatcactcaagctgtcatattttgcaataccaaaagaaaggttgactggctgacagagaagatgcgtagtaacaatttcactgtgtcctctatgcatggagatatgccacaaaaagaacgtgatgcaattatggccgaatttcgtgctggcacaactcgtgtcttaattacaacggacgtttgggctcgtggtcttgatgttcagcacgtctccttggtgataaactatgatcttcccaacaatcgtgaactttacattcatagaattggtcgctcacgtcgttttggtcgaaagggtgttgcaataaactttgtccgaaatgatgatataaggattttaagagatattgagcagtactacagtacccagatagatgaaatgcctatgaatgtggcagatctgatctaagtaattgggtcctgatgctgcagcataattttttagttcaatatgaaacctgatgcctgcgttgtacaatacatgttaacttgtccctgtagttgcagcagttgtgctatattcaagattttgcagcgggtagcagactggttcttggtgttgtgcctgcaacatatttgctctttgctcttctaccttgtagactgtgatgtgatctgctgaatggagtgctctattattcacactacaaattttcttgtaggtgttgttttaacttttttcttgagataaatattgagagtttgatatatttaatatatttgacttttaattggcg

SEQ ID NO: 533 - protein, 412 aa, Pinus taeda
MAAAGGSRNRNNNNVGRNPNAVNDENLIFETSAGVEAVSSFDQMGIRDDLLRGIYQYGFEKPSAIQQRAVMPIINGRDVIAQAQSGTGKTSMIALTVCQIIDTSIREVQALIVSPTRELAAQTEKVILAIGDFINVQAHACIGGKSIGEDIRKLEYGVHVVSGTPGRVCDMIKRRTLRTRAIKLLVLDESDEMLSRGFKDQIYDVYRYLPPELQVVLISATLPHEILEMTNKFMTDPVRILVKRDELTLEGIKQFFVAVEREEWKFDTLCDLYDTLTITQAVIFCNTKRKVDWLTEKMRSNNFTVSSMHGDMPQKERDAIMAEFRAGTTRVLITTDVWARGLDVQHVSLVINYDLPNNRELYIHRIGRSRRFGRKGVAINFVRNDDIRILRDIEQYYSTQIDEMPMNVADLI

SEQ ID NO: 534 - DNA, 1311 bp, Populus trichocarpa
atggccacaagcgtagtaccggctgggcggagcgctaggagggctgcggcggaggatgaaaagttagtgtttgaaacgacggagggaatagaacctgttgcaagtttcgatgagatgggattgaaagaagatgtactgagaggaatttataattatggatttgaaaagccgtcagcgatacaacaaagagctttaatgccaataattaaagggcgtgatgttatagcacaagctcaatctggtactggaaagacctctatgattgcccttactgcttgtcagcttgttgatactgctaacagagaggtccaggcactgatattgtcacctacaagggaactggcagagcagacagagaaagtgataacggcaattggtgaaaacattaatatacaagtacatgcatgcattggaggcaaaagcgtgggcgaggatattcgaaaactagaatatggagttcatgtagtctctggaactccaggcagagtctgtgacatgatcaagagaaggtcattacgtactagagccatcagagtactagttcttgatgaatctgatgagatgttgagcagagggttcaaggatcaaatttatgatgtttacagatatcttccacccgagcttcaggttgtcctgatttctgccactcttcctaatgaaattctggagattacaagcaagttcatgacagatcctgtaaagattcttgtgaaacgtgatgagttgactttggagggcatcaagcaattttttgttgctgtggaaaaagaagaatggaaatttgagactctgactgacctttatgatactcttaccatcactcaagctgttattttctgcaatacaaagcggaaggttgattggttaactgccaagatggttgaatttaactttactgtctcagcaatgcatggtgacatgcctcagagggagagagatgcaattatgtctaatttccgtctgggtgaaactcgtgtactgatcacaactgatgtttgggctcgggggcttgatgttcaacaggtttctttggtgatcaactatgaccttccaaacaatcgagagctttacattcatcgaattggtcgttctggtcgttttggacgtaagggtgttgccattaattttgtcaaaagtgatgatatcaggatcttaagagatattgagcagtattacagcacccagattgatgaaatgccgatgaatattggtgatctgatataagacatgctgacaagaaaaatgctagagtagctttaactcctatgataagattgtgattaagatgctctcttatcgaatttatacact

SEQ ID NO: 535 - protein, 407 aa, Populus trichocarpa
MATSVVPAGRSARRAAAEDEKLVFETTEGIEPVASFDEMGLKEDVLRGIYNYGFEKPSAIQQRALMPIIKGRDVIAQAQSGTGKTSMIALTACQLVDTANREVQALILSPTRELAEQTEKVITAIGENINIQVHACIGGKSVGEDIRKLEYGVHVVSGTPGRVCDMIKRRSLRTRAIRVLVLDESDEMLSRGFKDQIYDVYRYLPPELQVVLISATLPNEILEITSKFMTDPVKILVKRDELTLEGIKQFFVAVEKEEWKFETLTDLYDTLTITQAVIFCNTKRKVDWLTAKMVEFNFTVSAMHGDMPQRERDAIMSNFRLGETRVLITTDVWARGLDVQQVSLVINYDLPNNRELYIHRIGRSGRFGRKGVAINFVKSDDIRILRDIEQYYSTQIDEMPMNIGDLI

SEQ ID NO: 536 - DNA, 1557 bp, Populus trichocarpa
gttcagaagaataaatttattattttattaaattcgaacaaacagacttgaataaacataaaaatggccagacgcggtgccccaaacgaagatttatcgaatattgaattcgaaacaagtgaagaagttgaagttgtgcccactttcaattcaatgggattgagagaagagcttcttagggctatttatgcatatggttttgagaagccatcagcaattcaacaaagaagtattttaccaatagtcaaagggcgggatgttattgcacaagctcaatccggtactggtaaaacggcaacattttcaattgccatccttcaagcattggacacaacattacgtgaaacacaagtactatgtttatcaccaacccgtgaattggctgttcaaattcaaaaagtcattttggctttgggcgattttatgaatgttcaatgtcatgcatgcataggtggaacgaatttgggtgaagatattcgcaaattggactatggtcaacacatcgtcagtggaacaccaggacgtgtatttgatatgattaaacgtcgtgtattgcgaacacgttcaattaagatgttggtgcttgacgaagccgatgaaatgttaaacaaaggattcaaagaacaaatttacgatgtatacagatatttaccaccagcaactcaagtttgcttaatttcggctacattaccgcacgaaattcttgaaatgacatcaaaattcatgaccgatcccattcgtatattggtgaaacgtgatgaattgacactggagggtatcaaacaattttttgttgctgtcgaacgtgaagaatggaaatttgatactctttgcgatttatatgatacattgacaattacacaggcggtcatattttgtaatacaaaacgtaaggtcgattggttgaccgaaaagatgcgtgaagctaattttactgttagttcaatgcacggtgacatgccacaaaaagagcgtgacgaaattatgaaagaattccgttctggacagagtcgtgttttgattaccaccgatgtttgggctcgtggtatcgacgttcaacaagtatccttggttatcaattatgatttgccaaataatcgtgaattgtacattcaccgtatcggccgatcgggacgctttggacgtaaaggtgttgcgatcaattttgttaaatcggacgacatccgaattttgcgtgatatagaacaatactattcaacgcaaatcgatgaaatgccaatgaatgtggcagacttaatttaaatgattttagactcaaaacagaaaacaaaacaaaaacaaacaagaacgaacgaatattggtggaagagagaacgaataaaaatgaatggcgtttcagttttcaacaatctgtcatctttttggatatgatcatcatatcatgtctagttagaaagtcgttgcagataatgataataataataataataatactttccgtttattttcgaaatgaatcacttcacaattcacaatacacttaagttgtatgctaagtgcttagtttgcaaataaaataagttctacaatattcat

SEQ ID NO: 537 - protein, 399 aa, Populus trichocarpa
MARRGAPNEDLSNIEFETSEEVEVVPTFNSMGLREELLRAIYAYGFEKPSAIQQRSILPIVKGRDVIAQAQSGTGKTATFSIAILQALDTTLRETQVLCLSPTRELAVQIQKVILALGDFMNVQCHACIGGTNLGEDIRKLDYGQHIVSGTPGRVFDMIKRRVLRTRSIKMLVLDEADEMLNKGFKEQIYDVYRYLPPATQVCLISATLPHEILEMTSKFMTDPIRILVKRDELTLEGIKQFFVAVEREEWKFDTLCDLYDTLTITQAVIFCNTKRKVDWLTEKMREANFTVSSMHGDMPQKERDEIMKEFRSGQSRVLITTDVWARGIDVQQVSLVINYDLPNNRELYIHRIGRSGRFGRKGVAINFVKSDDIRILRDIEQYYSTQIDEMPMNVADLI

SEQ ID NO: 538 - DNA, 1113 bp, Phaeodactylum tricornutum
atgcaactgaaacccgatttactcaaggggatttacgcgtacggatttgaaaaaccgagcgccattcagcagcgtgccattcgacccatcattcgcggccgggacgtgattgcccagagccagtccggaacgggcaagacggccgtcttttccgtttccagtctacaactgttgcaagagaattcacgggagtgtcaagttttgattctcagtccgacacgggaattggcggaacaaacacaaaaggtcgtgcaagccttgggtgatttcatgaacgtgcattgccacgcgtgtattggcgggaaaagcctcggacaggatttgaacgcgttggaaaaaggaggaattcagattatctccggtacacctggacgtgttttcgatttgattcgacggaacgctctgtctcccaaccatcttaaagccatgattctggacgaagcggacgaaatgctcaaccggggtttcaaagaacagatttacgatatttatcggtttttgccagcatcgacccaggtggttttgatgagtgccacgctgcccgccagcgttctagacatgacacgcaagttcatgaacgatcctattcgcatcttggttcggcgcgacgagttgacgttggaaggcatccgacagttctttatcaatgtggaaaaggaagaatggaaatttgacacactctgtgacctatacgatacgttgacgatcacgcaagccgtaatcttttgcaatacgaaacaaaaggtcgattggttggcggggaagatgaaagacaagaactttacagtgtcagccatgcacggggatatggatcaaggtgcacgcgatgcggtcatggaagagtttcgctctggatcttcgcgcgtgttgatcgcgacggatttgtggggacggggtattgatgtccagcaagtcagcttggtcatctgctacgatcttccaacgaaccgcgagttgtacattcatcggatcgggcggtctggtcggtttggtcgcaagggaattgcgatcaactttgtccgcgaagaagacacccgactacttcgagatattgagcagttttacagtacgcaaatcgaggagatgccaacaaatgtgggtgatttactgtag

SEQ ID NO: 539 - protein, 370 aa, Phaeodactylum tricornutum
MQLKPDLLKGIYAYGFEKPSAIQQRAIRPIIRGRDVIAQSQSGTGKTAVFSVSSLQLLQENSRECQVLILSPTRELAEQTQKVVQALGDFMNVHCHACIGGKSLGQDLNALEKGGIQIISGTPGRVFDLIRRNALSPNHLKAMILDEADEMLNRGFKEQIYDIYRFLPASTQVVLMSATLPASVLDMTRKFMNDPIRILVRRDELTLEGIRQFFINVEKEEWKFDTLCDLYDTLTITQAVIFCNTKQKVDWLAGKMKDKNFTVSAMHGDMDQGARDAVMEEFRSGSSRVLIATDLWGRGIDVQQVSLVICYDLPTNRELYIHRIGRSGRFGRKGIAINFVREEDTRLLRDIEQFYSTQIEEMPTNVGDLL

SEQ ID NO: 540 - DNA, 1462 bp, Ricinus communis
gaaaaagaaaaagaaaaggaaaaacgagtgaaaagcgatggcgacaagcgttgtaccggcggggaggagcgcgagaagagcagcggcggaggatgagaaattggtgttcgagacgacagagggcatagaacctataacgagcttcgacgagatgggcataaagaacgatctgcttagagggatttacgcctatggctttgagaagccttcggcaatccaacagagggcggttatgccaataatcaaagggcgtgatgtcatagcccaagcgcaatctggtaccggcaagacctctatgattgctctcactgcttgccaactcgttgatacctctagtagagaggtccaggcactaatattgtcacctacaagggaactggcagctcagactgagaaagtaatattggcaattggtgattacattaatattcaagcacatgcatgcattggaggcaaaagtgtgggtgaggatattcgaaagcttgaatatggagttcatgttgtgtctggaactccaggcagagtctgtgacatgataaagaggaggacattacgtactagagccattaaattgctagttcttgatgagtctgatgagatgctgagcagagggttcaaggatcaaatttatgatgtgtacagatatcttccccctgaacttcaggttgtcttgatttctgctacccttcctaatgaaattttggagatgacgaacaaattcatgacagatcctataaagattcttgtgaaacgtgatgaattgacattggagggcatcaagcaattttttgtagcagttgaaagggaagaatggaaatttgatactttgtgtgatctttatgatactcttagcattacacaagcggttatattctgcaatacaaagcgaaaggtggattggcttactgaaaagatgcggaacaataactttacagtttcatcaatgcatggtgacatgccacaaaaggagagagatgcaattatgggagaattccagtctggtacaaccagagtcttgataactactgatgtttgggctcgggggcttgatgttcaacaggtttttctggtgattaattatgatcttccaaacaatcgagagctttacatccataggattggtcgttcaggtcgttttggacgcaagggtgttgccataaatttcgtcagaagtgatgatatcaagattttaagagatatggagcagtactatagtacccagattgatgaaatgccgatgaatgttgttgatctgatctgaagactttagtgtcgattgtattgccagcgtaatgtaacaatctttgagcaaaaatggctgaaatccttttctctggagatctttctccttaaataagaaaatcatgtacatcctaaattaggcagtaaatatattcagctcatgtaattgactattagctaactattttaagtaatatatacaaatacatgtaagaagaat

SEQ ID NO: 541 - protein, 407 aa, Ricinus communis
MATSVVPAGRSARRAAAEDEKLVFETTEGIEPITSFDEMGIKNDLLRGIYAYGFEKPSAIQQRAVMPIIKGRDVIAQAQSGTGKTSMIALTACQLVDTSSREVQALILSPTRELAAQTEKVILAIGDYINIQAHACIGGKSVGEDIRKLEYGVHVVSGTPGRVCDMIKRRTLRTRAIKLLVLDESDEMLSRGFKDQIYDVYRYLPPELQVVLISATLPNEILEMTNKFMTDPIKILVKRDELTLEGIKQFFVAVEREEWKFDTLCDLYDTLSITQAVIFCNTKRKVDWLTEKMRNNNFTVSSMHGDMPQKERDAIMGEFQSGTTRVLITTDVWARGLDVQQVFLVINYDLPNNRELYIHRIGRSGRFGRKGVAINFVRSDDIKILRDMEQYYSTQIDEMPMNVVDLI

SEQ ID NO: 542 - DNA, 1634 bp, Sorghum bicolor
aaaagcccaggcgcaggcggcgaaacaatcgggtccttctcctctcgtcttgtccccatccctctcccctttctttcctcatccaccagagtttcgctagctagggtttccaccaatggcggcgcccaccacctcccgccgcggccccggcggcgcgcgcaacatggacgacgagaacctcaccttcgagacctccccgggggtcgaggtcgtcagcagcttcgaccagatgggcatcaaggacgacctcctccgcggcatctacggctacggcttcgagaagccctctgccatccagcagcgcgctgtcctccccatcatcaacggccgcgacgtcatcgcgcaggcccagtccggtaccggcaagacgtccatgatctccctcaccgtctgccagatcgtcgacaccgccgtgcgcgaggtgcaggctttgatactctcgcctactagggagcttgcttcccaaacagagagagttatgctggctattggcgaccacctcaatgtccaagtgcatgcttgcattggtgggaaaagtattggtgaggatatcaggaggctcgagaacggagtgcatgtcgtctcaggaactccaggcagagtctgtgatatgatcaagaggaggaccctgcgaacaagagccatcaagcttctagttctggatgaagctgatgagatgttgagtagaggctttaaggatcagatttatgatgtctacagatatctcccaccagaacttcaggtgtgtttgatttctgcaactcttcctcatgagatcttggagatgactagcaagttcatgaccgaaccggttaggatccttgtgaagcgtgatgagctgaccctggagggtatcaaacaattctttgttgctgttgagaaagaggaatggaagtttgatactctttgtgatctttatgatacactcaccatcacccaagctgttattttctgcaatactaagagaaaggtggattggcttactgagaaaatgcgcagcaacaacttcacggtgtcagctatgcacggtgacatgccccaacaagaaagggatgccattatgggtgagttcaggtctggtgatactcgtgtgctaataactacggatgtttgggctcgaggactggatgttcagcaggtttcacttgtcataaattatgatctcccaaataatcgtgagctctacatccatcgcattggtcgatctggtcgttttgggcgcaagggtgtggcgatcaatttcgtgcgcaaggatgacatccgtatactgagagatatagagcagtactacagcacgcaaattgatgagatgccgatgaatgtcgctgatcttatttgagcaagaggattgggaggagggagcgtgttgtgttttatcatctcctgtccgcgcaaggtttggcttgagcctcctttgttgttggtgtcgctgtggactggaagagaggggctttgtaactggtggagcagagattgtttccgttttgatcatggcgtgaactgtatatattttagcttgctccagctcatgtaacactttcttgctgcgtttgtgcttgggacacgaagacctgtgttgatggcttcattagtgtgacaatgatttggtattggatttttggttgatcgtctgc

SEQ ID NO: 543 - protein, 407 aa, Sorghum bicolor
MAAPTTSRRGPGGARNMDDENLTFETSPGVEVVSSFDQMGIKDDLLRGIYGYGFEKPSAIQQRAVLPIINGRDVIAQAQSGTGKTSMISLTVCQIVDTAVREVQALILSPTRELASQTERVMLAIGDHLNVQVHACIGGKSIGEDIRRLENGVHVVSGTPGRVCDMIKRRTLRTRAIKLLVLDEADEMLSRGFKDQIYDVYRYLPPELQVCLISATLPHEILEMTSKFMTEPVRILVKRDELTLEGIKQFFVAVEKEEWKFDTLCDLYDTLTITQAVIFCNTKRKVDWLTEKMRSNNFTVSAMHGDMPQQERDAIMGEFRSGDTRVLITTDVWARGLDVQQVSLVINYDLPNNRELYIHRIGRSGRFGRKGVAINFVRKDDIRILRDIEQYYSTQIDEMPMNVADLI

SEQ ID NO: 544 - DNA, 1541 bp, Solanum lycopersicum
ggaggattattagggctttttcttcgtcgggaactctatctctcacaaagctaaaagctacaaattttctttcaattattgatggaggcggtggcgtcagggtcagttgttccggcgaacaggaggaggccgccaatggaggaggacaggttagttttcgagacatccaaaggtgttgaaccaatcaccagtttcgctgagatggggattaaagatgaccttcttagagggatttaccaatacggatttgaaaaaccatctgctatccaacaacgggctgtcttgcccattatatccggccgtgacgtcattgcacaggcacaatccggtaccggaaaaacctccatgattgcccttaccgtttgccaagttgtcgataccaaaaattccgaggtacaagcattgatattgtctcctacacgggagcttgcagctcagacagaaaaggtgattttggctattggagattacattaacatacaggcacatgcatgtattggaggcaaaagtgtgggtgaagatatcagaaagctagagcatggagtacaagttgtctctggaactcctggaagagtctgtgacatgattaaaaggagaactttacgaactagggccataaaattattgattcttgatgaatctgatgagatgttgagccgtggttttaaagatcagatatatgatgtttacagatatcttccaccagagcttcaggttgtactgatttctgccactcttccaaatgaaattctggagataacaagcaaatttatgacagatcctgttcggattcttgtaaaacgtgatgaattgactctagagggcatcaagcagttttttgtagcggtggagagagaagagtggaaatttgatacactgtgtgatctttatgatacactcaccatcacccaggctgttattttctgcaacacaaaacgaaaggttgattggctaactaacaagatgcgtgagaataattttacagtctcatctatgcacggagacatgccacagaaggaaagagatgctattatggctgagttccgaggtggcacgactcgtgttctaatcacaacagatgtttgggcgaggggacttgatgttcaacaggtgtctctggttattaattacgaccttccaaacaacagagagctctacattcatcgcattggtcggtcgggtcgttttggtcgaaagggtgttgctataaattttgtgaagactgatgatattaaaattttgagagacatagagcaatactacagtacccagatagatgaaatgcccatgaacgtggctgatttgatataaaagactcgcgtgcccgatcttctgaacatgggtgtgtatgggtgcattgctttgctttctgagtggtttgtatcgaagtattcaatttgtaatggcgagaaattagaggatgttctatttattggtactatgtgacatattagcttttcttgtactacactttgttgcaacatttactagtcttgagaaatttgttactgatgagtttcgttgaatttgacatggatttt

SEQ ID NO: 545 - protein, 409 aa, Solanum lycopersicum
MEAVASGSVVPANRRRPPMEEDRLVFETSKGVEPITSFAEMGIKDDLLRGIYQYGFEKPSAIQQRAVLPIISGRDVIAQAQSGTGKTSMIALTVCQVVDTKNSEVQALILSPTRELAAQTEKVILAIGDYINIQAHACIGGKSVGEDIRKLEHGVQVVSGTPGRVCDMIKRRTLRTRAIKLLILDESDEMLSRGFKDQIYDVYRYLPPELQVVLISATLPNEILEITSKFMTDPVRILVKRDELTLEGIKQFFVAVEREEWKFDTLCDLYDTLTITQAVIFCNTKRKVDWLTNKMRENNFTVSSMHGDMPQKERDAIMAEFRGGTTRVLITTDVWARGLDVQQVSLVINYDLPNNRELYIHRIGRSGRFGRKGVAINFVKTDDIKILRDIEQYYSTQIDEMPMNVADLI

SEQ ID NO: 546 - DNA, 1310 bp, Selaginella moellendorffii
atggcggcggtgcggcgcggcgggaacgaagatggcgaccagcacgtcgtcttcgagacgagcgccggcgtcgaggcgatcacgcagtttgagaagatggggatcaacgagagccttctcagaggtgtgtttgagtatggattcgagcggccgtcggcgatccagcagagggcgctcattccgatcatgaggggccgggatgtcatagctcaagcgcaatccggcacaggcaagacatccatgatcggcattgcggtgaatcagctcattgacactagcgtgagagaggtccaagcgctagttctctcgccgacacgcgagcttgccgaccagactgccaaggtcgttctaacactgggcagccacatgaacgttcaagctcatacgtgtatcggcggtaagagttttagcgaagacattagaaagctcgagcacggagttcatgtcgtgtctggaaccccgggtcgtgtctacgacatgctcaagcgccggactttcaggacgagacacgtcaagattttagttctggacgaatcagatgaaatgctcagcaggggattcaaagagcaaatcatcgattgctatcgctacttacctccggatctacaagtggtccttgtttccgctactctaccgcatgagattcttgagatgaccaacaagttcatgactgatcctgttcgcatccttgtcaaacgtgatgagttgacgctagagggaatcaagcagttcttcgtggctgtcgagaaggaggagtggaagtttgacacgctgtgcgacctctacgacacactcaccattacccaggccgtgatcttttgcaacacgaaaaggaaggtggagtggctgtcggagaagatgcggagcagcaactttaccgtgtcgtcgatgcacggagagatgccgcagaaagaaagggataccatcatgaaggagtttcgtgagggacaaacgcgggtgctcatcacaaccgatgtctgggctcggggtctggatgtacaacaggtctctctggtgatcaactacgatcttccaaacagccgagagttgtacattcacaggattggacgctctggacggttcggcagaaagggagtagcgatcaatttcgtgaagaacgatgacattcgaatcctccgagatatcgagcaatactacagcacacaagtcgatgaaatgccaatgaatgtggccgacttgatatgagcgaggcgaaagaagcttacactactttaacaaactgggcttcctctcttttgtaattttactgtgaagaattttgtactagttagagctaaagaaaattttgg

SEQ ID NO: 547 - protein, 401 aa, Selaginella moellendorffii
MAAVRRGGNEDGDQHVVFETSAGVEAITQFEKMGINESLLRGVFEYGFERPSAIQQRALIPIMRGRDVIAQAQSGTGKTSMIGIAVNQLIDTSVREVQALVLSPTRELADQTAKVVLTLGSHMNVQAHTCIGGKSFSEDIRKLEHGVHVVSGTPGRVYDMLKRRTFRTRHVKILVLDESDEMLSRGFKEQIIDCYRYLPPDLQVVLVSATLPHEILEMTNKFMTDPVRILVKRDELTLEGIKQFFVAVEKEEWKFDTLCDLYDTLTITQAVIFCNTKRKVEWLSEKMRSSNFTVSSMHGEMPQKERDTIMKEFREGQTRVLITTDVWARGLDVQQVSLVINYDLPNSRELYIHRIGRSGRFGRKGVAINFVKNDDIRILRDIEQYYSTQVDEMPMNVADLI

SEQ ID NO: 548 - DNA, 1559 bp, Saccharum officinarum
ccccttcttcctttctccgccagagtctcgctagctagggtttccaccaatggcggcgcccaccacctcccgccgaggccccggcggcgcgcgcaacatggacgacgagaacctcaccttcgagacctccccgggggtcgaggtcgtcagcagcttcgaccagatgggcatcaaggacgacctcctccgcggcatctacggctacggcttcgagaagccctccgccatccagcagcgcgccgtcctccccatcatcaacggccgcgacgtcatcgcgcaggcccagtccggtaccggcaagacgtccatgatctccctcaccgtctgccagatcgtcgacaccgccgtgcgcgaggtgcaggctttgatactctcgcctactagggagcttgcttcccaaacagagagagttatgctggctattggcgaccacctcaacatccaagtgcatgcttgcattggtgggaagagtattggtgaggatatcaggaggcttgagaacggggtgcatgtcgtctcaggaactccaggcagagtctgtgatatgatcaagaggaggaccctgcgaacaagagccatcaagcttctagttctggatgaagccgatgagatgttgagtagaggctttaaggatcagatttatgatgtctacagatatctcccaccagaacttcaggtgtgtttgatttctgcaactcttcctcatgagatcttggagatgactagcaagttcatgaccgaaccagttaggatccttgtgaagcgtgatgagctgaccctggagggtatcaaacaattctttgttgctgttgagaaagaggaatggaagtttgatactctttgtgatctttatgatacactcaccatcacccaagctgttattttctgcaatactaagagaaaggtggattggcttactgaaaaaatgcgcagcaataacttcacggtatcagctatgcacggtgacatgccccaacaagaaagagatgccattatgggtgagttcaggtccggcacaactcgtgtgctgataactacggatgtttgggctcgaggactggatgttcagcaggtttcacttgtcataaattatgatctcccaaataatcgtgagctttacatccatcgcattggtcgctctggtcgttttgggcgcaagggtgtggcgatcaatttcgtgcgcaaggatgacatccgtatactgagagatatagagcagtactacagcacgcaaattgatgagatgccaatgaatgtcgctgatcttatttgagcaagaggattgggaggagggagcgtgttgtgttttatcatctcctgtccttgcaaggtttggcttgagcctccttggtgttggtgtggctgtggactggacgagaggggctttgtaactggagtggagcagagattgtttccgttttggtcatggcatgaactgtatatattttagcttgctccagctcatgtaacactttcctgctgcgtttgtgcttgggacacaaagacctgtgttgatggcttcattagtgtgacaatgatttggtgtcggattttttgtt

SEQ ID NO: 549 - protein, 407 aa, Saccharum officinarum
MAAPTTSRRGPGGARNMDDENLTFETSPGVEVVSSFDQMGIKDDLLRGIYGYGFEKPSAIQQRAVLPIINGRDVIAQAQSGTGKTSMISLTVCQIVDTAVREVQALILSPTRELASQTERVMLAIGDHLNIQVHACIGGKSIGEDIRRLENGVHVVSGTPGRVCDMIKRRTLRTRAIKLLVLDEADEMLSRGFKDQIYDVYRYLPPELQVCLISATLPHEILEMTSKFMTEPVRILVKRDELTLEGIKQFFVAVEKEEWKFDTLCDLYDTLTITQAVIFCNTKRKVDWLTEKMRSNNFTVSAMHGDMPQQERDAIMGEFRSGTTRVLITTDVWARGLDVQQVSLVINYDLPNNRELYIHRIGRSGRFGRKGVAINFVRKDDIRILRDIEQYYSTQIDEMPMNVADLI

SEQ ID NO: 550 - DNA, 1600 bp, Solanum tuberosum
ggggaactccatctctcacaaagctaaaagttacaaattttctttcaattattcatggaggcggtggcgtcagggtcggttgttccggcgaacaggaggaggccgccgatggaggaagacaggttagttttcgagacatccaaaggtgttgaaccaataacgagtttcgctgagatggggattaaagatgaccttcttagagggatttaccaatacggcttcgaaaaaccatctgccatccaacaacgggctgtcttgcccattatatccggccgtgatgtcattgctcaggcacaatccggtaccggaaaaacctccatgattgcccttaccgtttgccaagttgtcgataccaaaaattccgaggtacaagcattgatattgtctcctacacgggagcttgcagctcagacggaaaaggtgattttggctattggagattacattaacatacaggcacatgcatgtattggaggcaaaagtgtgggtgaagacatcagaaagctagagcatggagtacaagtagtctctggaactcctggaagagtctgtgacatgattaaaaggagaactttacgaactagggccataaaattattggttcttgatgaatctgatgagatgttgagccgtggttttaaagatcagatatatgatgtttacagatatcttccaccagagcttcaggttgtactgatttctgccactcttccaaatgaaattctggagataacaagcaaatttatgacagatcctgttcggattcttgtaaaacgtgatgaattgactctagagggcatcaaacagttctttgtagcggtggagagagaagagtggaaatttgatacactgtgtgatctttatgatacactcaccatcacccaggctgttattttctgcaacacaaaacgaaaggttgattggctaactaacaagatgcgtgagaataattttacagtctcatctatgcacggagacatgccacagaaggagagagatgctattatggctgagttccgaggtggcacgactcgtgttctaatcacaacagatgtttgggcgaggggacttgatgttcaacaggtgtctttggtgattaattatgaccttccaaacaacagagagctctacattcatcgcattggtcggtctggtcgttttggtcgaaagggtgttgctataaattttgtgaagactgatgatattaaaattttgagagacatagagcaatactacagtacccagatagatgaaatgcccatgaacgtggctgatttgatataaaagactggagtgcccaatcttctgaacatggttgtgtatgggtgcattggtttgctttctgagtggtttgtatcgtaggattcaagtatgtcatggcgagaaattagagaatgttctatttattggtactatgtgacatattagctttcttgtactgcattttgttgcaacgtttactctggatgctctgttaacacagccttgagaaaatttgttactgatgagttttgctgaatttgtttaagatgtacaaatcgttgtctgaaacatatttttggaagtagtgacaatgtgcatattttttgtattttgtcct

SEQ ID NO: 551 - protein, 409 aa, Solanum tuberosum
MEAVASGSVVPANRRRPPMEEDRLVFETSKGVEPITSFAEMGIKDDLLRGIYQYGFEKPSAIQQRAVLPIISGRDVIAQAQSGTGKTSMIALTVCQVVDTKNSEVQALILSPTRELAAQTEKVILAIGDYINIQAHACIGGKSVGEDIRKLEHGVQVVSGTPGRVCDMIKRRTLRTRAIKLLVLDESDEMLSRGFKDQIYDVYRYLPPELQVVLISATLPNEILEITSKFMTDPVRILVKRDELTLEGIKQFFVAVEREEWKFDTLCDLYDTLTITQAVIFCNTKRKVDWLTNKMRENNFTVSSMHGDMPQKERDAIMAEFRGGTTRVLITTDVWARGLDVQQVSLVINYDLPNNRELYIHRIGRSGRFGRKGVAINFVKTDDIKILRDIEQYYSTQIDEMPMNVADLI

SEQ ID NO: 552 - DNA, 1595 bp, Triticum aestivum
tgcaggtaattcggcacgaggcacgtctccacacgacaccacccacccccacacccagctagggtttcgcttctccgatggcggcggcgggcggcgcgacgacctccaccaggcgcgggccgggcggcgggggccggccgatggacgacgagaacctgaccttcgagacctcggcgggggtggaggtcgtcggcagcttcgacgccatggggatccgggaggacctcctccgcggcatctacggctacggcttcgagaagccctccgccatccagcagcgggccgtcatccccatcatcaccggccgcgacgtcatcgcccaggcccagtccggcaccggcaagacctccatgatctccctctccgtctgccaggtcatcgagaccaacgtccacgaggtgcaggcgctgatactgtcgccaactagggaacttgcgacacaaacagagagggtgatgcaggctgttggtaacttcatgagcgtctctgtgcacgcctgtgttggtggcaaaagtatcggcgaggacattaggaagctcgagtctggagtgcatgttgtttcaggaacccccggcagagtatgcgatatgatcaagagaaggaccttgcgcacaagagccatcaagctcctagtcctggacgaagccgatgagatgttgagcagaggtttcaaggatcagatatatgatgtctacagatatcttcccccagaacttcaggttgttttgatctctgcaactctgccccatgacatcttggagataactagcaagttcatgactgatccagtcaggatccttgtaaaacgtgatgagttgaccctagagggcatcaaacaattctttgttgctgttgagaaagaggaatggaagtttgatacactatgtgatctttatgatacactgaccatcacccaagctgtcattttctgcaacactaagagaaaggtggattggcttactgaaaggatgcgcaccaacaacttcacagtgtcagctatgcacggtgacatgcctcagaaggaaagggatgcgatcatgagtgagttcaggggtggcatgacccgtgttctgatcacaaccgatgtttgggctcgggggctggatgtccagcaggtctctcttgtcattaattacgacctccccaacaaccgtgagctttacatccatcgtattggtcgctctgggcgtttcgggcgcaagggtgtggcgatcaactttgtgcgcaaggacgacatccgtatccttcgggacatcgagcagtactacagcacgcagatcgacgagatgcccatgaacgtcgccgatcttatttgagctctggaccggagcgatgtttccctctctctgtctttgccgctgtgtgtggggatttggttgcgatgcgatgtttgggctgtatttcttgtgctggagcttgagatttcttttgttgctttgggaacatgggaagtgtatatattctttctcggattgaccagctcatgtaaaacactcttttgttgttccgccatcttctgatttggacgccgccatgacagacaaacactctgttcatttcgattttgatattattagattttgtttcagtgttac

SEQ ID NO: 553 - protein, 412 aa, Triticum aestivum
MAAAGGATTSTRRGPGGGGRPMDDENLTFETSAGVEVVGSFDAMGIREDLLRGIYGYGFEKPSAIQQRAVIPIITGRDVIAQAQSGTGKTSMISLSVCQVIETNVHEVQALILSPTRELATQTERVMQAVGNFMSVSVHACVGGKSIGEDIRKLESGVHVVSGTPGRVCDMIKRRTLRTRAIKLLVLDEADEMLSRGFKDQIYDVYRYLPPELQVVLISATLPHDILEITSKFMTDPVRILVKRDELTLEGIKQFFVAVEKEEWKFDTLCDLYDTLTITQAVIFCNTKRKVDWLTERMRTNNFTVSAMHGDMPQKERDAIMSEFRGGMTRVLITTDVWARGLDVQQVSLVINYDLPNNRELYIHRIGRSGRFGRKGVAINFVRKDDIRILRDIEQYYSTQIDEMPMNVADLI

SEQ ID NO: 554 - DNA, 1110 bp, Thalassiosira pseudonana
atgaacctcaaacccaccctcctccgcggcatatacgcctacggcttcgaaaagccctcggcgattcaacaacgtgccattcggcccatcgtatgtggacgggatgtgattgctcaaagtcaatccggtacgggaaagacggcggtgttttccatctcgtcgttgcaattgttggatgagaggtcgaacgatccgcaggtgttgattttgagtcccacacgtgaattggccgagcagactcagcgggtggtttcttctttgggggactttatgaatgtcaagtgccatgcgtgtatagggggaaagtcgttgggggaggataggaaggtgttgcagcagggagtgcaggttctttcgggtactccggggagggtgtatgatctgatcaagaggggggatttgactactagggctttgaaggcgttcattattgatgaggcggacgagatgttgaataaggggtttaaggagcagatctatgacatctatagatatcttcctccacagacgcaggtggtcctcgtcagtgctaccctaccagtagaagtattggagatgacgaggaagtttatgaacgaccctattcgtatcttggtgaagagggatgagctcacgttggaaggtatcaagcaattctttgtctcggtggaaaaagaagaatggaagttcgacaccttgtgcgatttgtacgatactcttactgttacacaagcagtcatcttctgcaacacgaaacaaaaggtggattggttggcaacaaagatgagggaatcaaactttacggtagcagccatgcatggtgacatgacgcaagatgaacgtgacaaagtgatggaagactttcggtcggggtctagtcgagtgctcatcgcgactgatttgtgggggagaggtattgacgtacagcaagtgagtctcgtgatttgttacgatttgccgacgaatcgtgaactatacattcatcgcattggaaggagtggaaggtttggaaggaagggtgttgctatcaactttgtaaggacggaggatgtaaggacgttgagggatattgagcagttttacagtactcagattgacgagatgccgttgaatgttagtgatttgatgtga

SEQ ID NO: 555 - protein, 369 aa, Thalassiosira pseudonana
MNLKPTLLRGIYAYGFEKPSAIQQRAIRPIVCGRDVIAQSQSGTGKTAVFSISSLQLLDERSNDPQVLILSPTRELAEQTQRVVSSLGDFMNVKCHACIGGKSLGEDRKVLQQGVQVLSGTPGRVYDLIKRGDLTTRALKAFIIDEADEMLNKGFKEQIYDIYRYLPPQTQVVLVSATLPVEVLEMTRKFMNDPIRILVKRDELTLEGIKQFFVSVEKEEWKFDTLCDLYDTLTVTQAVIFCNTKQKVDWLATKMRESNFTVAAMHGDMTQDERDKVMEDFRSGSSRVLIATDLWGRGIDVQQVSLVICYDLPTNRELYIHRIGRSGRFGRKGVAINFVRTEDVRTLRDIEQFYSTQIDEMPLNVSDLM

SEQ ID NO: 556 - DNA, 1526 bp, Vitis vinifera
atggcagcagccgcaacagcgtcggtcgtgccggcgaacagaggcggtcgtcggaacggcgccgtcgacgatgagaagctggtgttcgagaccacggagggtgtggagcccatcatgagcttcgaccagatgggaatcaaggacgatctccttcggggcatctacgcctacggcttcgagaagccctccgccattcagcagagagcggtcttgcccatcattcagggccgcgacgtcatcgctcaggcccagtccggtaccggaaaaacctccatgattgctctcaccgtttgccagatggtcgacacttccaaccgagaggtccaagcattgatcctatcgcccacaagggaacttgcatctcagacagagaaagtgattctggccattggggatttcataaatatacaagcccatgcatgtattggaggcaaaagtgtaggtgaagatattagaaaactagaatatggcgttcacattgtgtctggaactcctggaagagtgtgcgacatgatcaagaggagaacattgcgtactagagctattaaactattagttcttgatgaatctgatgagatgttgagcagaggtttcaaggaccaaatttatgatgtttacagatatcttccaccagagcttcaggttgtcttgatttctgctacccttccaaatgaaattttggagataacgaacaaatttatgacagatcctgtaaggatccttgtgaaacgtgatgagttgactctagagggtataaagcaattttttgttgccgtagaaagagaagagtggaagtttgacactttatgtgatctttatgatactcttactatcactcaagctgttattttctgcaacacgaaacgaaaggtggattggctaactgagaagatgcgcagtaataactttaccgtctcatcaatgcatggagacatgcctcagaaggagagagatgctataatggcagagttccgttctggtactacccgtgtgctgatcacaacagacgtctgggctcgtgggcttgatgttcaacaggcaagtcatgtttccctggtgattaattatgaccttccaaataatcgagagctttacattcatcgtattggtcgttctggtcggtttggacgcaagggtgttgcaatcaactttgtcaaaaccgatgatatcaagattctaagagacatagagcagtactacagtacccagattgacgaaatgccaatgaatgtggccgatctgatttaaggagtctcctggccattttggccaagcagggaatgtaggttgtgactttgcgattgctcgactagtgctggttttttctcttgggtagtagtttgtatactatactggctttggcttttggctttttcctgggtgatagattgtacactattgggtcgcagattgaaggttttttctgtctctgggtttttgggtttttgtaatgagagtggtttcaattaaagattttctgtggatgacattatttttataattttttatgagaccaaatgccctca

SEQ ID NO: 557 - protein, 415 aa, Vitis vinifera
MAAAATASVVPANRGGRRNGAVDDEKLVFETTEGVEPIMSFDQMGIKDDLLRGIYAYGFEKPSAIQQRAVLPIIQGRDVIAQAQSGTGKTSMIALTVCQMVDTSNREVQALILSPTRELASQTEKVILAIGDFINIQAHACIGGKSVGEDIRKLEYGVHIVSGTPGRVCDMIKRRTLRTRAIKLLVLDESDEMLSRGFKDQIYDVYRYLPPELQVVLISATLPNEILEITNKFMTDPVRILVKRDELTLEGIKQFFVAVEREEWKFDTLCDLYDTLTITQAVIFCNTKRKVDWLTEKMRSNNFTVSSMHGDMPQKERDAIMAEFRSGTTRVLITTDVWARGLDVQQASHVSLVINYDLPNNRELYIHRIGRSGRFGRKGVAINFVKTDDIKILRDIEQYYSTQIDEMPMNVADLI

SEQ ID NO: 558 - DNA, 1566 bp, Zea mays
ccaacccgtcgagaccatccttcccttcttccctcctcgccagaggagagtctcgctagctagggtttccaccaatggcggcgcccaccacctcccgccgcggccccggcggcgcgcgcaacatggacgatgaaaacctcaccttcgagacctccccgggggtcgaggtcgtcagcagcttcgaccagatgggcatcaaggacgacctcctccgcggcatctacggctacggcttcgaaaagccctccgccatccagcagcgcgccgtcctccccatcatcaacggccgcgacgtcatcgcgcaggcccagtccggcaccggcaagacatccatgatctccctcaccgtatgccagatcgtcgacaccgccgtgcgcgaggtgcaggctttgattctctcgcctactagggagcttgcttcccaaacagagagagttatgctggctattggtgaccacctcaacgtccaagtacatgcttgcattggtggaaaaagtatcggtgaggatatcaggaggctcgagaatggggtgcatgttgtctcgggaactccaggcagagtctgtgatatgatcaagaggaggaccttgcgaacaagagccatcaagcttctagttctggatgaagctgatgagatgttgagtagaggttttaaggatcagatttatgatgtctacagatatctcccgccagaacttcaggtggttttgatctctgcaactcttcctcatgagatcttggagatgactagcaagttcatgacggaaccagttagaatccttgtaaagcgtgatgagctgaccctggagggcatcaaacaattttttgttgctgttgagaaagaggaatggaagtttgatactctttgtgatctttatgatacactcaccatcacacaagctgttattttctgcaatactaagagaaaggtggattggcttactgaaaaaatgcgcagcaataacttcacagtatcggctatgcacggtgacatgccccaacaagaaagggatgccattatgggcgagttcaggtccggcgcaactcgtgtgctaataactacggatgtttgggctcgaggactggacgtccagcaggtttcacttgtcataaattatgatctcccaaataatcgagagctttacatccatcgcattggtcgctctggtcgttttggacgcaagggtgtggcgatcaatttcgtgcgcaaggatgacatccgtatcctgagagatatagagcagtactacagcacgcaaattgatgagatgccaatgaatgttgctgatcttatttgagcaaccgctcctcgcaaggtttggcttggtgtggcggtgagaagtggacgagaggggctttgtaatctgagtggagcagagatttgtttgtttacttttttggtgacggcttgaactgtatgtatatatattttagcatgctccagctcatgtaacactttttgggagacctatgttggtggcttattgtgacaatgacacggagaactgtgctgctgtgaattgctgtttgattattattaattattatggttttggttggttgcaa

SEQ ID NO: 559 - protein, 407 aa, Zea mays
MAAPTTSRRGPGGARNMDDENLTFETSPGVEVVSSFDQMGIKDDLLRGIYGYGFEKPSAIQQRAVLPIINGRDVIAQAQSGTGKTSMISLTVCQIVDTAVREVQALILSPTRELASQTERVMLAIGDHLNVQVHACIGGKSIGEDIRRLENGVHVVSGTPGRVCDMIKRRTLRTRAIKLLVLDEADEMLSRGFKDQIYDVYRYLPPELQVVLISATLPHEILEMTSKFMTEPVRILVKRDELTLEGIKQFFVAVEKEEWKFDTLCDLYDTLTITQAVIFCNTKRKVDWLTEKMRSNNFTVSAMHGDMPQQERDAIMGEFRSGATRVLITTDVWARGLDVQQVSLVINYDLPNNRELYIHRIGRSGRFGRKGVAINFVRKDDIRILRDIEQYYSTQIDEMPMNVADLI

SEQ ID NO: 560 - DNA, 858 bp, Arabidopsis thaliana
atggaacaatactgggctttatataaagaactaactctctctcatctccgtctgttatactgggaacggactcgacggagcatagtgaacgggaaaataactgtcaagcgagcgagagagaaagagaaatcagaaatggtggttatggattctccagtttcggggagaatggctgatcagaacatcgatcctaacaccacgacgagccctagtcctatagagaagcatgtttcggcgattaaggctatctccggcgacgagaaagctccgtcgaaggagaaaaagaactacgcgtcgaagaaatcaactaccgtaatccagaaatcgcactgtttccagaattcttggacattttggttcgataatccttcctccaaatcgaatcaagtcatatggggaagctctttgagatctttgtatacattcgctaccatcgaagagttctggagtctttacaataacattcatcctccaaccaagtgggtgtcagggtcggatctctactgcttcaaagataagattgaaccaaaatgggaagatcctatctgtgccaatggaggaaaatggactatgtttttccctagagctacactagaatctaattggcttaacacgttacttgcgttggttggtgagcaatttgaccaaggagatgagatctgtggagcagttttgaacttcagaacgagaggggacaggatctctctatggacaaagaaagctgcaaatgaggaggctcagctaagcattgggaagcagtggaaggaacttcttggctacaatgacacaatcggatttatagttcatgaggatgcaaagactcttgatcgtgatgctaaacgtcgatatactgtatga

SEQ ID NO: 561 - protein, 285 aa, Arabidopsis thaliana
MEQYWALYKELTLSHLRLLYWERTRRSIVNGKITVKRAREKEKSEMVVMDSPVSGRMADQNIDPNTTTSPSPIEKHVSAIKAISGDEKAPSKEKKNYASKKSTTVIQKSHCFQNSWTFWFDNPSSKSNQVIWGSSLRSLYTFATIEEFWSLYNNIHPPTKWVSGSDLYCFKDKIEPKWEDPICANGGKWTMFFPRATLESNWLNTLLALVGEQFDQGDEICGAVLNFRTRGDRISLWTKKAANEEAQLSIGKQWKELLGYNDTIGFIVHEDAKTLDRDAKRRYTV

SEQ ID NO: 562 - DNA, 910 bp, Arabidopsis thaliana
gagtaatttaggcagttcggagaaacaatggcggtagaagacactcccaaatctgttgtaacggaagaagctaagcctaattcaatagagaatccgattgatcgataccatgaggaaggtgatgatgccgaagaaggagagatcgccggaggagaaggagacggaaacgttgacgaatcgagcaaatccggtgttcctgaatcgcatcctctggaacattcatggactttctggttcgataatcctgctgtgaaatcgaaacaaacctcttggggaagttccttgcgacccgtgtttacgttttcaactgttgaggaattttggagtttgtacaacaacatgaagcatccgagcaagttagctcacggagctgacttctactgtttcaaacacatcattgaacctaagtgggaggatcctatttgtgctaatggaggaaaatggactatgactttccctaaggagaagtctgataagagctggctctacactttgcttgcattgattggagagcagtttgatcatggagatgaaatatgtggagcagttgtcaacattagaggaaagcaagaaaggatatctatttggactaaaaatgcttcaaacgaagctgctcaggtgagcattggaaaacaatggaaggagtttctcgattacaacaacagcataggtttcatcatccatgaggatgcgaagaagctcgacaggaatgcaaagaacgcttacaccgcttgaaacctctcaaatctttgcattggtttcaattacagtttggtatgtgagagatctctatttatctaaacatgacttggacagtctgtctttgctagtgtctgattgctcacgacgctctaacatttcatttagtaatacactagtatggttcctcataacaaaaaaaaaaaaaaaa

SEQ ID NO: 563 - protein, 235 aa, Arabidopsis thaliana
MAVEDTPKSVVTEEAKPNSIENPIDRYHEEGDDAEEGEIAGGEGDGNVDESSKSGVPESHPLEHSWTFWFDNPAVKSKQTSWGSSLRPVFTFSTVEEFWSLYNNMKHPSKLAHGADFYCFKHIIEPKWEDPICANGGKWTMTFPKEKSDKSWLYTLLALIGEQFDHGDEICGAVVNIRGKQERISIWTKNASNEAAQVSIGKQWKEFLDYNNSIGFIIHEDAKKLDRNAKNAYTA

SEQ ID NO: 564 - DNA, 1331 bp, Oryza sativa
agccgaaaccttcttccccttctccttctctttcccctcggcggcggcggcggcttctcccttctcttctctctctcgcatcgcctactcgttcgttttccctcgaggaggagcagaggcggcggcggcggcggcggagcggacatggctgaggtggaggcagcgccgattgcggcggcggagaccccggaggtggcggcggcggagggagcggcggcggcgaaggcgccgcacaagctgcataggcagtgggcgttctggtacgacatccagtccaagcccaagcccggcgccgcgtgggggacctcgctccgcaaggcctacaccttcgacaccgtcgaggagttctggggcttgtatgatcagattttccgtccaagcaaggtgacagtaaatgctgattttcatttattcaaggctggtgtagaaccaaagtgggaagacccagagtgtgcaaatgggggcaaatggactgtgccatgtagcaggaagaccacccttgagaacatgtggcttgaaacgctgatggctctgattggagagcagtttgatgaaagtgaggaaatttgtggagttgttgctagtgtccgccagagaggagacaagcttgcattgtggactaggactgccagcaatgaagccgttcaggtaaacattggcaagaaatggaaggagattgttgactacaatgataagatggtctacagcttccatgatgacgccaagagggagaaaccaagcagaggtggacggtacaacgtgtaagtcaccgcaaaacgttgcagcttggatagtggccatcgagtggtgtgccgataccggcgcctgttctttacagcctcagctagtgttgttgtccgaggcaatttttccgacctattgtgttgctttcctctctgatagcttatggtaaaagatacaaagatgttgaggagtttgtacgccacttaattttgctcgtaacatacattgacaatcaagaggagccatggcattgcgatctgcttacacggcatattcttactggatggtgtacactacttaccctttttaatgcaagcatcaatccattgcttttctcactgcacacctgattcgtactgaaaacgtgaaacataaaaaaaaacaaaaatctagctgatgttggctctcggggcctcgagtctagtttgtcctagatggctaacctgatatgtgttggtcacgctcacgtttgaaccgagaaagagtgtgtgtgtgtgtgtgtcggcgtgctgctacaccagagcctccctgaatcgcaatgcgtgttaacgccagcatcgcaggatttcatctcacttgacaggttc

SEQ ID NO: 565 - protein, 206 aa, Oryza sativa
MAEVEAAPIAAAETPEVAAAEGAAAAKAPHKLHRQWAFWYDIQSKPKPGAAWGTSLRKAYTFDTVEEFWGLYDQIFRPSKVTVNADFHLFKAGVEPKWEDPECANGGKWTVPCSRKTTLENMWLETLMALIGEQFDESEEICGVVASVRQRGDKLALWTRTASNEAVQVNIGKKWKEIVDYNDKMVYSFHDDAKREKPSRGGRYNV

SEQ ID NO: 566 - DNA, 925 bp, Oryza sativa
gaccgacctcgacctagctaattaaggcgcaacacagaaaccctcaccgccgcccgcatccatggcggaggagcacgagacgaggccgccgtccgccggaaggccgccgtcgtccggccgcggcagggccgacgacgctgacgagagggaggagggggagatcgccgacgacgactccggccacgcgccgccgcaggccaaccccgccgcgccgcacccgctcgagcacgcctggaccttctggttcgacaacccgcagggaaagtccaagcaggcaacctggggaagctccatccgccccatccacaccttctccaccgtcgaggacttctggagcctttataacaatatccatcacccaagcaagttggttgtgggagctgacttccattgctttaagaataaaatcgagccaaaatgggaagatcctatctgtgctaatggaggtaaatggaccttcagctgtggcagaggaaagtccgacacaatgtggttgcatactttattggcaatgattggcgaacaattcgattatggggatgaaatttgtggagcagttgttagtgtgcgtggcaagcaggaaagaatagctatctggactaaaaatgctgccaatgaagctgctcagataagcattgggaagcagtggaaagaatttctggattacaaggactcgattgggttcattgttcatgacgatgcaaaaaagatggacaaaggtctcaagaaccgctacacagtttgatctgagcactcctgtccagatatccaagagagtagtatatccacatgtaggatgggttttcttcgatgctttagtgtttgtcattcgcttgtagcgagcgcttgaaggctataatattgccgtgaactgtttaaacttgaaacgtaatataatgacgtatcagaggtgtctctgtactct

SEQ ID NO: 567 - protein, 227 aa, Oryza sativa
MAEEHETRPPSAGRPPSSGRGRADDADEREEGEIADDDSGHAPPQANPAAPHPLEHAWTFWFDNPQGKSKQATWGSSIRPIHTFSTVEDFWSLYNNIHHPSKLVVGADFHCFKNKIEPKWEDPICANGGKWTFSCGRGKSDTMWLHTLLAMIGEQFDYGDEICGAVVSVRGKQERIAIWTKNAANEAAQISIGKQWKEFLDYKDSIGFIVHDDAKKMDKGLKNRYTV

SEQ ID NO: 568 - DNA, 955 bp, Arabidopsis thaliana
atggtggttacggattctccagtttcggggataatggctgatcagaacatcgatcctaacaccacgacgagccctagtcctaaagagaagcatgtttctgcgattaaggctatctccggcgacgagaaagctccgtcgaaggagaaaaagaactacgcgtcgaagaaatcaactaccgtaatccagaaatcgcactgtttccagaattcttggacattttggttcgataatccttcctccaaatcgaatcaagtcatatggggaagctctttgagatccttgtatacattcggtactatcgaagagttctggagtctctacaataacattcatcctccaaccaagtgggtttcgggggcggatctttactgcttcaaagataagattgaaccaaaatgggaagatcctatctgtgctaatggaggaaaatggagtatgatgttccctaaagctacactagaatgcaattggcttaacacgttacttgcgttggttggtgagcaatttgaccaaggagatgagatctgtggagcagttttgaacttcagagcgagaggggacaggatctctctatggacaaagaacgctgcaaatgaggaggctcagctaagcattgggaagcagtggaaggaacttcttggctacaatgagacaatcggatttatagttcatgaggatgcaaagactcttgatcgtgatgctaaacgtcgatatactgtatgagattcaacagttttacttgtcagcttcgccggggaaatcgagaagacgtaaaaggggaagtcaacatgacctttagttgcctctgatctatctttactgtaaaaaaagatgcacatttagttcacattttcaactatcagaattgttgaaacggatctgtatcaaaagtacatgatttcgtaattttcttagtggtataaaggaaaaggaatttcgaaattacatttcttac

SEQ ID NO: 569 - protein, 240 aa, Arabidopsis thaliana
MVVTDSPVSGIMADQNIDPNTTTSPSPKEKHVSAIKAISGDEKAPSKEKKNYASKKSTTVIQKSHCFQNSWTFWFDNPSSKSNQVIWGSSLRSLYTFGTIEEFWSLYNNIHPPTKWVSGADLYCFKDKIEPKWEDPICANGGKWSMMFPKATLECNWLNTLLALVGEQFDQGDEICGAVLNFRARGDRISLWTKNAANEEAQLSIGKQWKELLGYNETIGFIVHEDAKTLDRDAKRRYTV

SEQ ID NO: 570 - DNA, 986 bp, Brassica napus
atgaattgctttatatcactatgaaaaaactgaaaattactaataccatatgtacattttgattaaaacccattccaagtttgcaagtgggaacgctaatcacctcaaacacaaactgtgcatcttgttacagtgaaagattgagaacagaagcaacttaaaaggtcatatgttctctcataagacttcccttttgagtcttctttttctttactgggaagctgacaagtaaacccctgaatctcatacggtatagcgaggtttagcattacgatcaagagtctttgcatcctcatgaaagatgaatccgattgtctcattgcaaccaagacgttccttccactgtttcccaatgcttatctgagcttcctcattagcagcgttcttggtccatagcgagatcttatcccctctcgttctgaaattcaaaactgccccgcaaatctcatctccatgctcaaattgctcaccaactaacgaaagtaacgtgttaagccaattggattccagtgtagccttagggagcatcatagtccactttcctccattagcacatacaggatcttcccacttgggttcgatttcatgtttgaagcagtagagatccgacccgtgaacccacttggttggaggatggatgttattgtaaagactccagaactcctcgatggtagcgaatgtgtacaaggttctcaaagagcttccccatgcggcttgattcgatttcgaggaaggattatcgaaccagaaggtccccgcactctgcaaggcgtgcgaatgttcgattacggtggttgatttcgatttcttccacacatagccgtttccgccgcatgtgatcttttgctccttcgacggaccttcttcgccgccgccgatagccttaatcgccggcaaatgcttctggatagggcaatggttcgcggtgttaggatcgagattctcctcttccgccataatcgctgataccgaagaaccctcaaccc

SEQ ID NO: 571 - protein, 237 aa, Brassica napus
MAEEENLDPNTANHCPIQKHLPAIKAIGGGEEGPSKEQKITCGGNGYVWKKSKSTTVIEHSHALQSAGTFWFDNPSSKSNQAAWGSSLRTLYTFATIEEFWSLYNNIHPPTKWVHGSDLYCFKHEIEPKWEDPVCANGGKWTMMLPKATLESNWLNTLLSLVGEQFEHGDEICGAVLNFRTRGDKISLWTKNAANEEAQISIGKQWKERLGCNETIGFIFHEDAKTLDRNAKPRYTV

SEQ ID NO: 572 - DNA, 775 bp, Brassica rapa
gggagagggagagacgatggcggtagaagacactctcaagcctaatgtcgctacggaagaatcgaatcccaattctgcagatcacccgatcgatcgataccatgaggaaggcgacgatgccgaggaaggagagatcgtagacgaatcgagcaaatccgccgtccctgaatcgcatccgttggagcattcgtggactctctggttcgataacccttccgtcaaatcaaagcagacgacttggggaagctccttacgatccgtcttcaccttctccaccgtcgaggagttctggagtttgtacaataacattcggcacccgagcaagttagctaacggagctgacttgtactgtttcaaacacaatatcgaacctaagtgggaggatcctatctgtgccaacggaggcaagtggactatgaacttctctagggagaagtctgataagccctttctttacaccttgcttgctttgattggagaacagtttgaccatggagatgaaatctgtggagttgttgttaacgttagagctaagcaagagaggatatctatttggactaaaaactcttccaacgaagctgctcaggtgagcattgggaggcaatggaaggagtttcttgattacaacagcagcattggtttcatcatccatgaggatgcgaagaagctggacagaggcgcaaagagcgcttacactgcctgaaacctacaacctctcaaatgttttagccgtttctattacagtttttgtatgtgagagatctctatttatatc

SEQ ID NO: 573 - protein, 228 aa, Brassica rapa
MAVEDTLKPNVATEESNPNSADHPIDRYHEEGDDAEEGEIVDESSKSAVPESHPLEHSWTLWFDNPSVKSKQTTWGSSLRSVFTFSTVEEFWSLYNNIRHPSKLANGADLYCFKHNIEPKWEDPICANGGKWTMNFSREKSDKPFLYTLLALIGEQFDHGDEICGVVVNVRAKQERISIWTKNSSNEAAQVSIGRQWKEFLDYNSSIGFIIHEDAKKLDRGAKSAYTA

SEQ ID NO: 574 - DNA, 909 bp, Brassica rapa
ggacgccgtatcttaaccaaactaaccctacgcaggaagaagtgcatccatcgtttagagagaagaagaaagaggcaagttttgcaatggcggtagaagacacttccaagcctgttgtcgttgcggaagaagcgaaccctaaccccacagtccatccgattgatcgaaaccatgaagaaggcgacgatgttgaggaaggagagatcgccggcggcgaaacagacggagacgaatcgagcaaatccgccgttcctcagtcgcatccgttggagcattcgtggaccttctggttcgataacccttctgttaaattaaagcaggcgacttggggaagctccttgcgatccgtgttcactttctccaccgtcgaggagttctggagtctgttcaataacatgaagggtccgagcaagttagctggcggagctgacttctactgtttcaagcacaatatcgaacctaagtgggaggatcctatctgtgctaatggaggcaaatggactatgaacttcccgaaggagaagtctgataagccctggctttacactttgcttgcgttgattggagaacagtttgaccacggagatgagatatgcggagctgttgtcaacgttagaggaaagcaagagaggatttccatttggaccaaaaatgcttccaacgaagctgctcaggtgagcattgggaaaaaatggaaggagtttattgattacaacaacagcattggtttcatcatccatgaggatgccaagaagctggacaggggcgcgaagagcgcttacaccgcttgaaaccccccaacaattctctcaaatggttacaccgtttcaaatgcagttttgtatgtgagagatctctatttacattttcaaaacatgacttgacactagtattattaatgtatttgta

SEQ ID NO: 575 - protein, 234 aa, Brassica rapa
MAVEDTSKPVVVAEEANPNPTVHPIDRNHEEGDDVEEGEIAGGETDGDESSKSAVPQSHPLEHSWTFWFDNPSVKLKQATWGSSLRSVFTFSTVEEFWSLFNNMKGPSKLAGGADFYCFKHNIEPKWEDPICANGGKWTMNFPKEKSDKPWLYTLLALIGEQFDHGDEICGAVVNVRGKQERISIWTKNASNEAAQVSIGKKWKEFIDYNNSIGFIIHEDAKKLDRGAKSAYTA

SEQ ID NO: 576 - DNA, 875 bp, Capsicum annuum
aaagtaaaaaaagcacacagcaccaacaatggcaacagctgaaatggagaaaacgacgacgtttgatgaagctgagaaggtgaaattgaatgctaatgaggcagatgatgaagttgaagaaggtgaaattgttgaagaaactgatgatacgacgtcgtatttgagcaaagaaatagcaacaaagcatccattagagcattcatggactttctggtttgataatccagaggcgaaatcgaaacaagctgcttggggtagctcgcttcgcaacgtctacactttctccactgttgaagatttttggggtgcttacaataatatccaccacccaagcaagttagttgtgggagcagacttacattgtttcaagcataaaattgagccaaagtgggaagatcctgtatgtgccaatggagggacatggaaaatgagtttttcaaagggtaaatctgataccagctggctatatacgctgcttgcaatgattggacatcaattcgatcatgaagatgaaatttgtggagcagtagttagtgtcagaggtaagggagaaaaaatatctttgtggaccaagaatgctgcaaatgaaacggctcaggttagcattggtaagcaatggaagcagtttctggattacagcgacagtgttggcttcatatttcacgacgatgcaaagaggctcgacagaaatgcaaagaatcgttacacagtataattcttgatgcaatgtcggaatataagaaacacaattcgtactgaaaagttgtaggcactagtttagtttctcatacgataaagcttctggtttgagtaccttgtgtattggtgtttgcactttctaatcgcgtaaaattgtccggttttggattcaaaaa

SEQ ID NO: 577 - protein, 228 aa, Capsicum annuum
MATAEMEKTTTFDEAEKVKLNANEADDEVEEGEIVEETDDTTSYLSKEIATKHPLEHSWTFWFDNPEAKSKQAAWGSSLRNVYTFSTVEDFWGAYNNIHHPSKLVVGADLHCFKHKIEPKWEDPVCANGGTWKMSFSKGKSDTSWLYTLLAMIGHQFDHEDEICGAVVSVRGKGEKISLWTKNAANETAQVSIGKQWKQFLDYSDSVGFIFHDDAKRLDRNAKNRYTV

SEQ ID NO: 578 - DNA, 876 bp, Citrus clementina
caaaaaagcagaagtcacgagaggaaatggcaggagagagcgataacccaagaactgaagaccaaacaaacaccaaaaaccctaaccctagcgaagaagaggagctggaggaaggcgagatcgttggcgacgatgagccctcgaagaattcaaccgccgtgatgcaacagccgcatcctctcgaacactcttggaccttctggttcgataacccttttgccaaatcaaaacaagccacgtggggtagctccatgcgctccatctacaccttctcctccgttgaagagttctggagcctttacaacaatatacatcatccgagcaagttggctgtgggagcagacttttattgtttcaagaataagattgagccaaaatgggaggacccagtttgtgctaatggcgggaagtggactgtcatctttcctaaaggaaaatctgacacttcttggctgtatacgttgctggcaatgattggagaacagtttgatcatggagatgaaatctgtggagcagttgtaaatgttagagctaggcaggaaaagatatctctgtggaccaagaatgcttcaaatgaagctgctcagatgagcattgggaaacagtggaaggagttactcgattatagtgacaccatagggttcatctttcatgaggatgcaaagcatgacaacaggtcaaagaatcgctacacaacataaactgtacagagttttgcagtgtagtccccggaaatgccttgtatttttctggaggacagtaggcttgttagttgttatagagctctgaaacatttttgcatttcctgttttctgtactaatgccctcctaaaaaggttctttaaagccctagctgaattttacccttgccttttt

SEQ ID NO: 579 - protein, 224 aa, Citrus clementina
MAGESDNPRTEDQTNTKNPNPSEEEELEEGEIVGDDEPSKNSTAVMQQPHPLEHSWTFWFDNPFAKSKQATWGSSMRSIYTFSSVEEFWSLYNNIHHPSKLAVGADFYCFKNKIEPKWEDPVCANGGKWTVIFPKGKSDTSWLYTLLAMIGEQFDHGDEICGAVVNVRARQEKISLWTKNASNEAAQMSIGKQWKELLDYSDTIGFIFHEDAKHDNRSKNRYTT

SEQ ID NO: 580 - DNA, 886 bp, Cichorium endivia
accgagttctagagagagagatagagagagaaacagaattcttgagaaagatggtggaagaagcagtgaaatcggatgaacagaagttaatcgatgtcagcaaacacaggggtgttcgatcggacggagaagaagatgagcaactggaagagggagagattgtcggtggcgacggcgatacgctgtcgtcgtcgtcttcttccaggcctggtaccgccatagcgcagcatcaactcgagcattcttggacattctggttcgatactcccgctgccaagtccaagcaagtcgcttggggtagttccatgcgccctatctacactttctccaccgttgaagagttctggagtctttacaacaatatacatcgaccaagcaaattggctcaaggagctgacttctattgcttcaaaaataaaatcgagcctaagtgggaagaccctgtttgtgctaatggtggaaagtggactatgaccttttccaaagcaaaatccgacacctgttggctgtatacgttgctagcaatgattggagaacagttcgatcatggagatgatatatgtggagcagttgtaaacgttagagcaaggcaagaaaaaatagctttatggaccaaaaatgctgccaatgagagcgcccagctaagcattggtaaacagtggaaggagtttattgattacaatgacaccataggctttatatttcatgaagatgcaaagaatcttgacagaaatgctaaaaacaaatacacagtatgagttgtgcctaaaatgtgatctcttttgtcatgcatgacctccatttgtatggatgaatgatgaatttacttgactatttctattttgcatgaagtttatatcctatcttactgttagttttggataaa

SEQ ID NO: 581 - protein, 235 aa, Cichorium endivia
MVEEAVKSDEQKLIDVSKHRGVRSDGEEDEQLEEGEIVGGDGDTLSSSSSSRPGTAIAQHQLEHSWTFWFDTPAAKSKQVAWGSSMRPIYTFSTVEEFWSLYNNIHRPSKLAQGADFYCFKNKIEPKWEDPVCANGGKWTMTFSKAKSDTCWLYTLLAMIGEQFDHGDDICGAVVNVRARQEKIALWTKNAANESAQLSIGKQWKEFIDYNDTIGFIFHEDAKNLDRNAKNKYTV

SEQ ID NO: 582 - DNA, 836 bp, Cichorium intybus
accgagttctagagagagagagagagatagagagagaaacagaattctagataaagatggtggaagaagcagtgaaatcggatgaacagaagttaatcgatttcagcaaacacaggggtgttcgatcggatggagaagaagatgagcaactggaagagggagagattgtcggtggcgacggcgatacgctgtcgtcgtcgtcttcttccaggcctggtaccgccatagcgcagcatcaactcgagcattcttggacattctggatcgataccccagctgccaaggccaagcaagtcgcttggggtagttccatgcgccctatctacactttctccaccgttgaagagttctggagtctttacaacaatatacatcgaccaagcaaattggctcaaggagctgacttctattgcttcaaaaataaaatcgagcctaagtgggaagaccctgtttgcgctaatggtggaaagtggactatgaccttttccaaagcaaaatccgacacctgttggctgtacacgctgctagcaatgattggagaacagttcgatcatggagatgatatatgtggagcagttgtaaacgttagagcaaggcaagaaaaaatagctttatggaccaaaaatgctgccaatgagagtgcccagctaagcattgggaaacagtggaaggagtttattgattacaaggacaccataggctttatatttcatgaagatgcaaagaatcttgacagaaatgctaaaaacaaatacacagtttgagttgtgcctaaaatgtgatctcttttgtcatgcatgacctccatttgtatggatgaatgatgaatgtacttg

SEQ ID NO: 583 - protein, 235 aa, Cichorium intybus
MVEEAVKSDEQKLIDFSKHRGVRSDGEEDEQLEEGEIVGGDGDTLSSSSSSRPGTAIAQHQLEHSWTFWIDTPAAKAKQVAWGSSMRPIYTFSTVEEFWSLYNNIHRPSKLAQGADFYCFKNKIEPKWEDPVCANGGKWTMTFSKAKSDTCWLYTLLAMIGEQFDHGDDICGAVVNVRARQEKIALWTKNAANESAQLSIGKQWKEFIDYKDTIGFIFHEDAKNLDRNAKNKYTV

SEQ ID NO: 584 - DNA, 846 bp, Centaurea maculosa
gcgggggagtagaagagaagaagaagaagaagagagattgttaacagttatggtggaagaggttgagaaatcatcagaagatcatcaaaagacgaaggatgccgccattaatgccactaaacacaaaggcgtctgcaattccgacggagaagaagaagaagaagaagaagatcgacggaaagaagataacgccggtgacggagatcgtacacattctgctaaggatgtattaaaacgacatccgctagagcattcatggaccttctggttcgataatccgtctgctaaatccaaacaggtcgcttgggggaactccatccgccctatctacaccttctctaccgttgaagaattctggagcctctacaacaatttacatcgaccgagcaggctgactgcgggagcagaccttcattgtttcaaaaacggaatcgagcctaaatgggaggacccggtttgcgctcctggtggaaagtggactatgacctttcccaagtcaaaatccgacacatgttggctctacacgctgctagcgatgattggagaacagtttgattacggggatgagatatgtggggcggtcgtaaatgtgagatcaaggcaggaaaaaatagctctgtggactaaaactgctgccaatgaggctgcacagatgagcattgggagacaatggaaagagtttcttgattacaatgatgtaataggcttcatatttcatgaggatgcgaagaaactcgacagaggtgccaaaaataaatactcaacatgatggatgatgatgaggtaggaaggagtaggacttgcttttgttttggtattccaggtttttgcttatagaaattgata

SEQ ID NO: 585 - protein, 239 aa, Centaurea maculosa
MVEEVEKSSEDHQKTKDAAINATKHKGVCNSDGEEEEEEEDRRKEDNAGDGDRTHSAKDVLKRHPLEHSWTFWFDNPSAKSKQVAWGNSIRPIYTFSTVEEFWSLYNNLHRPSRLTAGADLHCFKNGIEPKWEDPVCAPGGKWTMTFPKSKSDTCWLYTLLAMIGEQFDYGDEICGAVVNVRSRQEKIALWTKTAANEAAQMSIGRQWKEFLDYNDVIGFIFHEDAKKLDRGAKNKYST

SEQ ID NO: 586 - DNA, 841 bp, Centaurea maculosa
  misc_feature (776)..(776): n is a, c, g, or t
ggtggaagaagtagggaaatcctcatcagaggacttataggcaatcgatctctacaacatgaactaccaacacaaacctcctgttcgatcggatgaagaaggaggagaacaagaagacgaccagcagttggaagaaggagagatcggtggcgatggcgataacctatcgtcgtcttcttcctccagacctggcacggccgtagcgcagcaccacccgctcgagcattcatggacgttttggttcgatactcctgctgctaaatccaaacaggtcgcctgggggagctccatgcgccctatctacactttctctactgttgaagagttctggagcctttacaacaatatacaccgaccaagcaagttggctacaggagccgacttctattgtttcaaagacaaaatcgagcccaagtgggaagaccctgtttgcgctaatggcggaaagtggaccatgacctttacaaagacaaagtccgacatatcttggctgtatacgttgctagcgatgattggagaacagtttgatcatggagatgatatatgtggagcggttgttaatgtcagacaaaggcaggaaaaaatatctctgtggaccaagaacgctgccaatgagagtgctcagctaagcatcggcaaacagtggaaggagtttcttgatcacaatgaaaacattggcttcatatttcatgaagacgcgaggaaacatgagagaagtgccaaaaacaaatactcactatgaggtggtgtgcccatgtttttgtagtgtgcctaanatgcaaattaggctcttggtggtatcttggactttagtacatccagttccttctttacttcatgc

SEQ ID NO: 587 - protein, 227 aa, Centaurea maculosa
MNYQHKPPVRSDEEGGEQEDDQQLEEGEIGGDGDNLSSSSSSRPGTAVAQHHPLEHSWTFWFDTPAAKSKQVAWGSSMRPIYTFSTVEEFWSLYNNIHRPSKLATGADFYCFKDKIEPKWEDPVCANGGKWTMTFTKTKSDISWLYTLLAMIGEQFDHGDDICGAVVNVRQRQEKISLWTKNAANESAQLSIGKQWKEFLDHNENIGFIFHEDARKHERSAKNKYSL

SEQ ID NO: 588 - DNA, 902 bp, Citrus sinensis
gggggagccggaaacaaaaaagcagaagccaccgagaggaaatggctggagagagcgataacccaagaactgaagaccaaacaaacaccaaaaaccctaaccctagcgaagaagaggagctggaggaaggcgagatcgttggcgacgatgagccctcgaagaattcaaccgccgtgatgcaacagccgcatcctctcgaacactcttggaccttctggttcgataacccttttgccaaatcaaaacaagccacgtggggtagctccatgcgctccatctacaccttctcctccgttgaagagttctggagcctttacaacaatatacatcatccgagcaagttggctgtgggagcagacttttattgtttcaagaataagattgagccaaaatgggaggacccagtttgtgctaatggcgggaagtggactgtcatctttcctaaaggaaaatctgatacttcttggctgtatacgttgctggcaatgattggagaacagtttgatcatggagatgaaatctgtggagcagttgtaaatgttagagctaggcaggaaaagatatctctgtggaccaagaatgcttcaaatgaagctgctcagatgagcattgggaaacagtggaaggagttgcttgattatagtgacaccatagggttcatctttcatgaggatgcaaagcatgacaacaggtcaaagaatcgctacacaacataaactgtacagagttttgcagtgtagtcccaggaaatgcattgtattttctggatgacagtaggcttgttagttgttatagagctctgaaacattttgccatttcctgttttctgtactaataccctcttaaaaggttctttaaagcactagctgattttacctttgcaatatatttgaagtttaaag

SEQ ID NO: 589 - protein, 224 aa, Citrus sinensis; identical to SEQ ID NO: 579

SEQ ID NO: 590 - DNA, 857 bp, Centaurea solstitialis
  misc_feature (837)..(837): n is a, c, g, or t
attctagagagagaagaagagagagaaaacagaattccatacacaaaaatggtggaagaagtagtgaagaaatcatcagaggaccacaacaacaacccactcgatctcaacaacaaacacaaacctcctgttcgatcggatgaagaaggaggagaacaagaagacgaccagcaccagttggaagaaggagagatcgccattggcgatgtcgataacctatcgtcgtcttcttcctccagacctggtacggccgtagcgcagcaccacccgctcgagcattcatggacgttctggttcgatactcctgctgctaaatctaaacaggtcgcttgggggagctccatgcgccctatctacactttctctactgttgaagagttctggagcctctacaacaatatacaccgaccaagcaagttggctacgggagccgacttctattgtttcaaagacaaaatcgagcctaagtgggaggaccctgtttgcgctaatggcggaaagtggactatgacctttacaaagacgaagtccgacatatcttggctgtatacgttgctagcgatgattggggaacagtttgatcatggagatgatatatgtggagcggttgttaatgtccgacaaaggcaggaaaaaatttctctgtggaccaagaacgctgccaatgagagtgctcagctaagcatcggcaaacagtggaaggagtttcttgatcacaatgaaaacattggcttcatatttcatgaagacgcgaggaaacatgagagaagtgccaaaaacaaatactcactatgaggtgtgcgcatggttttgtagtgtgcctaaaatgcagtttangctcttggtggtatcttgga

SEQ ID NO: 591 - protein, 248 aa, Centaurea solstitialis
MVEEVVKKSSEDHNNNPLDLNNKHKPPVRSDEEGGEQEDDQHQLEEGEIAIGDVDNLSSSSSSRPGTAVAQHHPLEHSWTFWFDTPAAKSKQVAWGSSMRPIYTFSTVEEFWSLYNNIHRPSKLATGADFYCFKDKIEPKWEDPVCANGGKWTMTFTKTKSDISWLYTLLAMIGEQFDHGDDICGAVVNVRQRQEKISLWTKNAANESAQLSIGKQWKEFLDHNENIGFIFHEDARKHERSAKNKYSL

SEQ ID NO: 592 - DNA, 841 bp, Carthamus tinctorius
actttttctctcgcttcttcatcggcaaattgcagatcaaacgggagttttagagagagagagaaaagaaagcagaattctacacaaaaatggtggaagaagtagtgaaatcagaggaccacaaggcgctcgatctcaacaaacacaagcctcctgctcgatcggaagaagaagaagaagaagaagacgaccagcagttggaagaaggagagatcgtcggtggcggcgatgccgataacctatcgtcgtcgtcttcctccagacctggtacggccttaactcagcagcacccgctcgagcattcatggaccttctggttcgatactcctgctgctaaatccaaacaggtcgcctggggtagctccatgcgccctatctacactttctctactgttgaagagttctggagcctttacaacaatatacaccgaccaagcaagttggctacgggagctgacttctattgtttcaaagacaaaatcgagcccaagtgggaggaccctgtttgcgctaatggcggaaagtggactatgacctttacaaagttaaagtctgatatctcttggctgtatacgttgctagcgatgattggagaacagtttgatcatggagatgatatatgtggagcggttgttaatgtccgacaaaggcaggaaaaaatttccctgtggaccaagaacgctgccaatgagagcgctcagctaagcatcggcaaacagtggaaggagtttcttgatcacaatgaaaacattggcttcatatttcatgaagacgcgaggaaacatgagagaagtgccaaaaacaaatactcactatgaggtgtgcccatgtttttgtagtg

SEQ ID NO: 593 - protein, 242 aa, Carthamus tinctorius
MVEEVVKSEDHKALDLNKHKPPARSEEEEEEEDDQQLEEGEIVGGGDADNLSSSSSSRPGTALTQQHPLEHSWTFWFDTPAAKSKQVAWGSSMRPIYTFSTVEEFWSLYNNIHRPSKLATGADFYCFKDKIEPKWEDPVCANGGKWTMTFTKLKSDISWLYTLLAMIGEQFDHGDDICGAVVNVRQRQEKISLWTKNAANESAQLSIGKQWKEFLDHNENIGFIFHEDARKHERSAKNKYSL

SEQ ID NO: 594 - DNA, 834 bp, Euphorbia esula
caagaaaccaagtgaaatcgaagcaaaaatggcggtggaagagccactcaaatcatcactaccaacgacagaagaaaccgtgaatccaaaatccgtggaagatgtgaacattgatgatccagaggaagcagagatcgtggacgatgacgaatcttccagcaagaaattgagcgctgtaacctacgagccgcatcttcttgagaatcaatggaccttttggtttgataatccatctgccaaatccaaacaagccacctggggaagctctatgcgtcctgtctatacttttggcactgtcgaggaattttggagtgtttataataatattcatcatccaagcaagcttgctagaggagcagacctccattgtttcaaacacaaaatcgagccaaaatgggaggatcctatttgttctaatggagggaggtgggctatatattctaaagggaaaactgatacctcttggttgtatacattgctggctatgatcggagagcaatttgatcatggagatgaaatatgtggagcagttgttaatgttaggggtaagcgggataggatatcaatttggaccaagaatgctcccaatgaagctgctcagctgagcattggaaagcaatggaaggagttccttgattacaatgaaactattgggttcatattccatgatgatgcaatgaagcaagatatacctaaggatcgctacactgtatgaggagttgtatagacagtttcttcttatggaggagctatgaaacccatttcatagcacaccaattgcttagagattaccaacctagaactttttgtctaaatgattgttcatttgatgag

SEQ ID NO: 595 - protein, 228 aa, Euphorbia esula
MAVEEPLKSSLPTTEETVNPKSVEDVNIDDPEEAEIVDDDESSSKKLSAVTYEPHLLENQWTFWFDNPSAKSKQATWGSSMRPVYTFGTVEEFWSVYNNIHHPSKLARGADLHCFKHKIEPKWEDPICSNGGRWAIYSKGKTDTSWLYTLLAMIGEQFDHGDEICGAVVNVRGKRDRISIWTKNAPNEAAQLSIGKQWKEFLDYNETIGFIFHDDAMKQDIPKDRYTV

SEQ ID NO: 596 - DNA, 926 bp, Fragaria vesca
cgagaaaacacgaacgaaacggcagtgaaagcgaagccctagaaatctcgaagccctagaaatctcaaccatggtggtggaggaggcagccaagactatctcagcttcagaggatcagagcaagacggagtcgaacaaccctaaatcaatgcaagacgagaacgagctcgaagaaggagagatcgtcggcggcggcgacgacgagtcgtcgaagatgtcgaagccgcagcagcaccctctggagcactcgtggaccttctggttcgatatcccgtcgtccaagcccggcaagtccaagcaagaggattggggcagctcgcttcgcccgatctacaccttctctactgttgaggagttctggggtatctacaacaatatacgccatccaagcaagttgaatgtggggacagacttccattgtttcaaaaacaaaattgagccaaagtgggaggatcctgtgtgtgctaatggagggaaatggactctgacatttcctaaagggaaatctgataattcctggctgcatacgttgctggcactgatcggggaacagtttgatcatggagatgaaatatgtggagcagttgtcaatgttagaggcaggcaagaaaaaatttcaatttggaccaagaatgcagaaaatgaggcagctcagatgagcattggcaaacaatggaagagctttctggatagcaacgaaaatataggtttcatatttcatgaagatgcaagacgggagagaaatcccaagaatagttacactgtgtgatcagtatagtgctgtttctagcactcaatgtttctgaacctgagcattgtatgctttagttgcgggagtgactaaccaagttcctgctaattgttccccttcctctcgtatggcatagttaaactttctttaatgataagaatgaacatagatgttt

SEQ ID NO: 597 - protein, 232 aa, Fragaria vesca
MVVEEAAKTISASEDQSKTESNNPKSMQDENELEEGEIVGGGDDESSKMSKPQQHPLEHSWTFWFDIPSSKPGKSKQEDWGSSLRPIYTFSTVEEFWGIYNNIRHPSKLNVGTDFHCFKNKIEPKWEDPVCANGGKWTLTFPKGKSDNSWLHTLLALIGEQFDHGDEICGAVVNVRGRQEKISIWTKNAENEAAQMSIGKQWKSFLDSNENIGFIFHEDARRERNPKNSYTV

SEQ ID NO: 598 - DNA, 916 bp, Gossypium hirsutum
gggcttgaagaaaatctcaaatcaatgaacatcaacgaagaagaaaacaagaaccctaagaaccctaaccctaacagtaaagatgaagaagatggtgaacttgaagaaggggagatcgcaggtgaagaagatgatacgacgtcgtcttcgttaaagaaaggtatcgtcgaacagcctcacccgttggagcattcatggaccttttggtttgataacccttttgctaaatcaaaacaagctatttggggtagttctatgcgccctatttacactttctccaccatcgaacaattctggagtctttacaataacatacatcatccaagcaaattgtctcctggagcggacttccattgtttcaaacataaaatcgagcccaagtgggaagaccctgtctgtgctaacggaggcaagtggactgtaagtttcccaaaggggaaatcagatacgtcttggttgtacacgttgctggctttgataggggaacagtttgagtacggtgatgaaatctgtggagcagttgttagtgtgagaggcaagctggaaaaaatagcattgtggaccaagaatgctgccaatgaaactgcgcagatgagcatcgggaaacagtggaaagagttacttgattacaacgacactatcggcttcatatttcatgatgatgcaaagaagctcgacagaggtgccaagaatcgctacacagtatgactttctgtagagttcttctctaccggacggcatgcgtggcacaatcgggactctctgtatgcttcctatggcttatctttgttgcctcctttcagattctagtttcgagctattgctgttttttacaaagacttttagctatataaagcgaatcttagtactaccttaagtttcaattttatgaccatttatgaaatgctttttcaag

SEQ ID NO: 599 - protein, 227 aa, Gossypium hirsutum
MNINEEENKNPKNPNPNSKDEEDGELEEGEIAGEEDDTTSSSLKKGIVEQPHPLEHSWTFWFDNPFAKSKQAIWGSSMRPIYTFSTIEQFWSLYNNIHHPSKLSPGADFHCFKHKIEPKWEDPVCANGGKWTVSFPKGKSDTSWLYTLLALIGEQFEYGDEICGAVVSVRGKLEKIALWTKNAANETAQMSIGKQWKELLDYNDTIGFIFHDDAKKLDRGAKNRYTV

SEQ ID NO: 600 - DNA, 953 bp, Gerbera hybrid
cagaattctagagagagatggtggaagaagtagtgaaatcggaggagcagaagccaatggatgtcaacaaacacaggggcgttcgatcggacggagaagaagatgaacaactggaagagggagagatcgtcggcagcggcggcgacggcgatacgctgtcatcttcttcatccaggcctggtacggccatggcgcagcatccgctcgagcattcatggacgttctggttcgatagtcctgctgctaagcaaaagcaggccgaatggggtagttctatgcgccctatttacactttctccaccgttgaggagttctggagcctttacaacaatatacataagccaagcaagttgactacgggggcggatttgtattgtttcaaaaataaaatagagccaaagtgggaggaccctgtttgtgctaatggtggaaaatggaccacgacttattatgccaagggaaagtccgacacaccttggctctattcgttgctagcaatgattggagaacagtttgatcatggagatgatatatgtggagcagttgtgaatgttcgaggcaagcatgaaaaagtctctctctggaccaagaatgctgctaacgagagtgctcagataagcatcgggaaacagtggaaggagtttcttgattacaatgacagcattggcttcatattccatgaggatgcgaagaaactcgacagaggtgccaaaagcaaatacccagtatgaatatgaacggtagccgtgcttttgtcaactttaaaacatccgctttatggagggttttttcatgtattcatgaatgtactacttgactgttaccatctgtcgattttatgaaggttttttttgttaagttcttgatgcttgtgaccaacaaaatcaacaaaagtcattactctttcttgtagggttaatggcatgaatacccttgtactattggttaatttt

SEQ ID NO: 601 - protein, 237 aa, Gerbera hybrid
MVEEVVKSEEQKPMDVNKHRGVRSDGEEDEQLEEGEIVGSGGDGDTLSSSSSRPGTAMAQHPLEHSWTFWFDSPAAKQKQAEWGSSMRPIYTFSTVEEFWSLYNNIHKPSKLTTGADLYCFKNKIEPKWEDPVCANGGKWTTTYYAKGKSDTPWLYSLLAMIGEQFDHGDDICGAVVNVRGKHEKVSLWTKNAANESAQISIGKQWKEFLDYNDSIGFIFHEDAKKLDRGAKSKYPV

SEQ ID NO: 602 - DNA, 714 bp, Glycine max
atggttgtagaagatacccaaaagtcagtcatcacggaggaccaataccctagcagggtcgtcagcgacaacaacaacgacgacgacgacgatgatctcgaagagggtgagatccccgtcgacggcgaagatagcggcgccaccgccacaacgaagcctccggccgccctcgcccgaaacccccaccctctggagaattcctggaccttctggttcgacaacccttcctccaagtccaaacaagccgcatggggcagctccatccgacccatctacactttcgccaccgttgaagagttttggagcatttacaataacattcaccacccgagcaagttgggtttgggggcggactttcactgcttcaagcacaagattgagccaaagtgggaggaccctatctgcgccaatgggggaaagtggactatgaccttcccaaggggaaaatctgataccagttggttgtatacgttgttggcgatgattggagaacagtttgatcacggagatgaaatatgtggagctgttgtgaatgtcagaagtaggcaggataaaattgctatttggactaagaacgcttcaaatgaagctgctcaggtgagcattggaaagcagtggaaggagtttcttgattacaatgacacaattggctttatatttcatgaggatgcaaagaagctggacagaggtgctaaaaataaatacgttgtatga

SEQ ID NO: 603 - protein, 237 aa, Glycine max
MVVEDTQKSVITEDQYPSRVVSDNNNDDDDDDLEEGEIPVDGEDSGATATTKPPAALARNPHPLENSWTFWFDNPSSKSKQAAWGSSIRPIYTFATVEEFWSIYNNIHHPSKLGLGADFHCFKHKIEPKWEDPICANGGKWTMTFPRGKSDTSWLYTLLAMIGEQFDHGDEICGAVVNVRSRQDKIAIWTKNASNEAAQVSIGKQWKEFLDYNDTIGFIFHEDAKKLDRGAKNKYVV

SEQ ID NO: 604 - DNA, 828 bp, Gossypium raimondii
tcgagagaaaaaaaatggggcttgaacctttcacaaatcaatgaacatcaacgaagaagaaaacaagccccctaaccctaacactaaagatgaagaagacggtgaacttgaagaaggggagatcgcaggtgaagaagatgatacgacgtcgtcttcgttaaagaaaggtgtcgtcgaacagcctcacccgttggagcattcatggaccttttggtttgataacccttctgctaaatcaaaacaagctacttggggtagttctatgcgccctatttacactttctccactatcgaacaattctggagtctttacaataacatacatcatccaagcaaattgcctcatggagcggacttccattgtttcaaacataaaatcgagcccaagtgggaagaccctgtctgtgctaacggaggcaagtggactgtaagtttcccaaaggggaaatcagatacgtcttggttgtacacgttgctggctttgataggggaacagtttgagtacggtgatgaaatctgtggagcagttgttagtgtgagaggcaagctggaaaaaatagcattgtggaccaagaatgctgccaatgaaactgctcaggtgagcattgggaaacagtggaaagagttacttgattacaacgacactatcggcttcatatttcatgatgatgcaaagaagctcgacagaggtgccaagaatcgctacacagtatgactttctgtagagttcttctctaccggacggcatgcgtggcacaatcgggactctctgtatgcttcctatggcttgtctttgtcgcctcctttcggattctagtttcgagctat

SEQ ID NO: 605 - protein, 224 aa, Gossypium raimondii
MNINEEENKPPNPNTKDEEDGELEEGEIAGEEDDTTSSSLKKGVVEQPHPLEHSWTFWFDNPSAKSKQATWGSSMRPIYTFSTIEQFWSLYNNIHHPSKLPHGADFHCFKHKIEPKWEDPVCANGGKWTVSFPKGKSDTSWLYTLLALIGEQFEYGDEICGAVVSVRGKLEKIALWTKNAANETAQVSIGKQWKELLDYNDTIGFIFHDDAKKLDRGAKNRYTV

SEQ ID NO: 606 - DNA, 861 bp, Helianthus annuus
cggggcgacttgcgatcaacagagttttagatagagagaaacagaattctagagagagaaacaacattcttgaaaaaaatggtggaagaaatagtgaaaccagaggaccagaagataatcagaggtgttggatcggacggagaagaagatgagcagccggaagacggagaaatcatcgacggtgatactttgtcgtcatcgtcttcttcgaggcctggtacggccgtagtgcagcatccgctggagcactcatggacgttctggttcgataatcccagtgctaagtctaaacaagccgcttggggtagttctatgcgccctatttacactttctccactgttgaagagttctggagcctttacaacaatatacacctaccaagcaagttggctcaaggtgctgacttctattgtttcaaaaacaaaatcgagcctaagtgggaggaccccgtttgcgctaacggtggaaagtggactatgaccttttccaagtcaaagtctgatatgtgttggctgtatacgttgctagcaatgattggagaacagtttgatcacggcgatgatttatgtggagccgttgtaaatgtcagagcgagacaggagaaaatatctctatggaccaagaatgctgccaatgagagtgctcagacaagcattgggaagcagtggaaagagttccttgattacagtgatgtcataggcttcatatttcatgaagatgcaaagaagcttgacagaggcgctaaaaacaaatacactgtgtgaggtgtgccatgtttttgtagtgctttaaatgtgacatttagatggacctcaaactatttttttcttgaattttggtatcctactggtagatctata

SEQ ID NO: 607 - protein, 228 aa, Helianthus annuus
MVEEIVKPEDQKIIRGVGSDGEEDEQPEDGEIIDGDTLSSSSSSRPGTAVVQHPLEHSWTFWFDNPSAKSKQAAWGSSMRPIYTFSTVEEFWSLYNNIHLPSKLAQGADFYCFKNKIEPKWEDPVCANGGKWTMTFSKSKSDMCWLYTLLAMIGEQFDHGDDLCGAVVNVRARQEKISLWTKNAANESAQTSIGKQWKEFLDYSDVIGFIFHEDAKKLDRGAKNKYTV

SEQ ID NO: 608 - DNA, 859 bp, Helianthus annuus
ctcggccgggcacctttcgatcaaccgacttattatagagagagaaaccacatttctagagagagaaaacctaacaacaacaatggtggaagaagcactgaaaacagacgattcaaggccaatcgacgacaccaaaaccagaggcgttcgatcggacggagaagaagacgaacagctggaagaaggagagatcgccggcggtgacatcgacggcgacacgctgtcgtcgtcttcttcgaggcctggtacagccgtagtacagcatccgctcgaacactcgtggacgttctggtttgataaccctagcgccaaggctaaacaggcctcttggggtagttctatgcgccctatctacactttttctacagttgaagagttctggagcctctacaacaatatacaccgaccaagcaaattggcttctggagccgacttctattgcttcaaaaataaaattgagccaaagtgggaggaccctgtgtgtgctaatggtggaaagtggactatgactttttcaaaggccaagtctgatatgtgttggctgtatacgttgctagcaatgattggtgaacagtttgatcacggtgatgatatatgtggagcagttgttaatgtcagagcaaggggagaaaagatatctttgtggaccaagaatgctgccaatgagagtgctcaggtgagcattggaaaacagtggaaggagtttcttgattacaatgagatgatagggttcatatttcatgaagatgcgaagaaacttgacagaggtgctaaaaacaaatacacaatatgaggtgggcgcgcgtgttttggtagtgaaacttagggtgttggtacacttggactgcaagtaactctt

SEQ ID NO: 609 - protein, 236 aa, Helianthus annuus
MVEEALKTDDSRPIDDTKTRGVRSDGEEDEQLEEGEIAGGDIDGDTLSSSSSRPGTAVVQHPLEHSWTFWFDNPSAKAKQASWGSSMRPIYTFSTVEEFWSLYNNIHRPSKLASGADFYCFKNKIEPKWEDPVCANGGKWTMTFSKAKSDMCWLYTLLAMIGEQFDHGDDICGAVVNVRARGEKISLWTKNAANESAQVSIGKQWKEFLDYNEMIGFIFHEDAKKLDRGAKNKYTI

SEQ ID NO: 610 - DNA, 913 bp, Helianthus annuus
agaaagagagagagagtgatggtggaagaagcaggggatcaaaagacgaccggtaaacacaaggacggaggagaagaagaaggtaaggacattgtaaaacggcatccgcttgagcattcatggaccttctggttcgataatccttctgctaagtctaagcaggtcgcctggggtagctccatccgccctatttacactttctccaccgtcgaagaattctggagcctttacaacaatatacatagaccaagcaggttggcagctggagcagacctccattgtttcaaaaacagaattgagcccaaatgggaggatcccgtgtgcgctggtggaggaaagtggactatgacctttcccaagtcgaaatccgacacgtgttggctatacacgttgctagcaatgattggagaacagtttgatcatggcgatgagatatgcggggcagttgttaatgtgagatcaaggcaggaaaaaatagctctctggacaaagaatgctgccaatgagcctgcacagatgagcattgggaaacaatggaaggagtttcttgattacagtgacatgataggcttcatatttcatgagaatgctaagaaacttgacagaggtgccaaaaataagtacacaacataatgcgttttgtgtttgtgtttgtgttcgtgttctgtctacccaaatgcaagctttgtagggactgcatgcatccacttgtttagcagctttgcatgcatatcaacatttgcaatggacacctcattcttatgtagttgatcctaataaataccacttatttcgaataagaatgtctagcagttgcgggccttcttttagtggtggaatcataacttttaaaacgagttgcaataaggtttttgattggtttgaacatgcaaaggtgcggacacccatctca

SEQ ID NO: 611 - protein, 204 aa, Helianthus annuus
MVEEAGDQKTTGKHKDGGEEEGKDIVKRHPLEHSWTFWFDNPSAKSKQVAWGSSIRPIYTFSTVEEFWSLYNNIHRPSRLAAGADLHCFKNRIEPKWEDPVCAGGGKWTMTFPKSKSDTCWLYTLLAMIGEQFDHGDEICGAVVNVRSRQEKIALWTKNAANEPAQMSIGKQWKEFLDYSDMIGFIFHENAKKLDRGAKNKYTT

SEQ ID NO: 612 - DNA, 816 bp, Helianthus paradoxus
ggaatgaagagagagagacagagagagagagtgatggtggaagaagtaggggatcaaaagacgaccggtaaacacaaggacggaggagaagaagaagaagaaggaggtaaggacattgtaaaacggcatccgcttgagcattcatggaccttctggttcgataatccttctgctaagtctaagcaggtcgcctggggtagctccatccgccctatttacactttctccaccgtcgaagaattctggagcctttacaacaatatccatagaccaagcaggttggcagctggagcaggcctccattgtttcaaaaacagaattgagcccaaatgggaggatcccgtgtgtgctggtggaggaaagtggactatgacctttcccaggtcgaaatccgacacgtgttggctatacacgttgctagcaatgattggagaacagtttgatcatggcgatgagatatgcggggcagttgttaatgtgagatcaaggcaggaaaaaatagccctctggacaaagaatgctgccaatgagcctgcacagatgagcattgggaaacaatggaaggagtttcttgattacaatgacatgataggcttcatatttcatgaggatgctaagaaacttgacagaggtgccaaaaataagtacacaacatgatgtgttcgtgttcgtgttctgtctacccaaatgcaagctctgtagggactgcatgcatccacttgtttagtagctttgcatgcatatcaacatttgcaatggacacctcattcttatgtagttgatcccaataagtaccacttatttcgaataagaatg

SEQ ID NO: 613 - protein, 217 aa, Helianthus paradoxus
MKRERQRERVMVEEVGDQKTTGKHKDGGEEEEEGGKDIVKRHPLEHSWTFWFDNPSAKSKQVAWGSSIRPIYTFSTVEEFWSLYNNIHRPSRLAAGAGLHCFKNRIEPKWEDPVCAGGGKWTMTFPRSKSDTCWLYTLLAMIGEQFDHGDEICGAVVNVRSRQEKIALWTKNAANEPAQMSIGKQWKEFLDYNDMIGFIFHEDAKKLDRGAKNKYTT

SEQ ID NO: 614 - DNA, 816 bp, Helianthus paradoxus
gatctgataccacttttttctgggcggttgcagacttgcagatcaacagagttatagagagagggaaacagaattctagagagagaaacaacattcttgaaaaaaatggtggaagaaatagtgaaaccagaggaccagaagataatcagaggcgttggatcggacggagaagaagatgagcagccggaagacggagaaatcatcgacggtgatactttatcgtcatcgtcttcttcgaggcctggtacgggcgtagtgcagcatccgctggagcactcatggacgttctggttcgataatcccagtgctaagcctaaacaagccgcttggggtagttctatgcgccctatttacactttctccactgttgaagagttctggagcctttacaacaatatacaccgaccaagcaagttggctcaaggtgctgacttctattgtttcaaaaacaaaatcgagcctaagtgggaggaccccgtttgcgctaacggtggaaagtggactatgaccttttccaagtcaaagtctgatatgtgttggctgtatacgttgctagcaatgattggagaacagtttgatcacggcgatgatttatgtggagccgttgtaaatgtcagagcgagacaggagaaaatatctctatggaccaagaatgctgccaatgagagtgctcagacaagcattgggaagcagtggaaagagttccttgattacagtgatgtcataggcttcatatttcatgaagatgcaaagaagcttgaccgaggcgctaaaaacagatacactgtgtgaggtgtgccatgtttttgtagtgcc

SEQ ID NO: 615 - protein, 228 aa, Helianthus paradoxus
MVEEIVKPEDQKIIRGVGSDGEEDEQPEDGEIIDGDTLSSSSSSRPGTGVVQHPLEHSWTFWFDNPSAKPKQAAWGSSMRPIYTFSTVEEFWSLYNNIHRPSKLAQGADFYCFKNKIEPKWEDPVCANGGKWTMTFSKSKSDMCWLYTLLAMIGEQFDHGDDLCGAVVNVRARQEKISLWTKNAANESAQTSIGKQWKEFLDYSDVIGFIFHEDAKKLDRGAKNRYTV

SEQ ID NO: 616 - DNA, 845 bp, Helianthus petiolaris
ctcttccacacacttgttattacgagagagaaaccacatttctagagagagaaaacctaacaacaacaatggtggaagaagcactgaaaacagacgattcaaagccaatcgacgacaccaaaaccagaggccttcgatcggacggagaagaagacgaacagctggaagaaggagagatcgccggcggtgaaatcgacggcgacactctgtcgtcgtcttcttctaggcctggtacggccgtagtgcagcatccgctcgaacactcgtggacgttctggtttgataaccctagcgctaaggctaaacaggcctcttggggtagttctatgcgccctatctacactttttcaacagttgaagagttctggagcctttacaacaatatacaccgaccaagcaaattggcttctggagccgacttctattgcttcaaaaataaaattgagccaaagtgggaggaccctgtgtgtgctaatggtggaaagtggactatgactttttcaaagaccaagtctgatatgtgttggctgtatacgttgctagcaatgattggtgaacagtttgatcatggtgatgatatatgtggagcagttgttaatgtcagagcaaggggagaaaagatatctttgtggaccaagaatgctgccaatgagagtgctcaggtaagcattggaaaacagtggaaggagtttcttgattacaatgaaacaatagggttcatatttcatgaagatgcgaagaaacttgacagaggtgctaaaaacaaatacacggtatgaggtgtgcgcgcgtgtttttgtagtgaaacttaggtttgtggtacacttgactgcaagtaactcttg

SEQ ID NO: 617 - protein, 236 aa, Helianthus petiolaris
MVEEALKTDDSKPIDDTKTRGLRSDGEEDEQLEEGEIAGGEIDGDTLSSSSSRPGTAVVQHPLEHSWTFWFDNPSAKAKQASWGSSMRPIYTFSTVEEFWSLYNNIHRPSKLASGADFYCFKNKIEPKWEDPVCANGGKWTMTFSKTKSDMCWLYTLLAMIGEQFDHGDDICGAVVNVRARGEKISLWTKNAANESAQVSIGKQWKEFLDYNETIGFIFHEDAKKLDRGAKNKYTV

SEQ ID NO: 618 - DNA, 1331 bp, Hordeum vulgare
cggcacgaggaccaccgccgccgccgtcgccagctctcatccgctagcgccgcccgtccgtcctagaaaaggccaggaccttatcgccgccggcggcgccgcagggatggcggaggacacggagacgaggcccgcgtcggcgggcgcggaggagagggaggagggggagatcgcggacgacggagacgggtccgcggcggcggcggccgggcgcgtcagcgcccaccctctggagaacgcctggaccttctggttcgacaacccgcagggcaagtcccgggcggtggcctgggggagcaccatccaccccatccacaccttctccaccgtcgaggacttctggagcctttacaacaatattcatcaccctagcaagttgaatgttggagcagacttccattgcttcaaggataagattgagccaaaatgggaagaccccatttgtgccaatggcggtaaatggaccatcagttgtggcaaagggaaatctgacacattttggttgcatactttgctggcattgattggtgaacaattcgactttggtgatgaaatttgcggagcagtcgtcagcgtgcgtaagaaccaggaaagagtagctatctggactaaaaatgctgccaatgaaactgctcagataagcatcggtaagcagtggaaggagtttctggactacaaggactccattggattcgtcgttcatgaggatgctaagaggtccgacaaaggcgccaagaaccgctacacggtttgatcctgggagcttccaaggcaggcccgcctactcttggatgcaagaaagcttctcatggaatagctttagcttgtagcgggtggatgctgtttcccgaaggatatattacatgtgttgctgtgaattgcttcaaagacatgatctaacatatttgtgtttgtcgtcgttgtactccataagtctcattttattctatgatgagaagcataacttgttttaggtgcagtgtttagtctactctactgctggatctatcttgcacgcgagatggtttccagtgcagaagactgctcagttgtcagttgtgtgtgcaaacttgttttagctgcagtgtttagtctactctactgctggatctatcttgcacgcgagatggtttccagtgcagaagactgctcagttgtcagttgtgtgtgcaaacttgttttagctgcagtgtttagtctactctactgctggatctatcttgcacgcgagatggtttccagtgcagaagactgctcagttgtcatttgtgtgtgcaaacttggatgtgatgtctggagtatgtcacaaaaaattacagaggattacttca

SEQ ID NO: 619 - protein, 215 aa, Hordeum vulgare
MAEDTETRPASAGAEEREEGEIADDGDGSAAAAAGRVSAHPLENAWTFWFDNPQGKSRAVAWGSTIHPIHTFSTVEDFWSLYNNIHHPSKLNVGADFHCFKDKIEPKWEDPICANGGKWTISCGKGKSDTFWLHTLLALIGEQFDFGDEICGAVVSVRKNQERVAIWTKNAANETAQISIGKQWKEFLDYKDSIGFVVHEDAKRSDKGAKNRYTV

SEQ ID NO: 620 - DNA, 1137 bp, Ipomoea nil
ggagagactaggttgatatagtacctctacgaaggcggcgataatttttactcggcgaagtttcattttcgaaggccgaagaaagaaatcagtgtgcgattttccgttcacttcaaaaatctctgaggatcaaaaggcacaagccctgaaaatggtggaagaactcgagaaatcaaccaaacctgaggaaccggagaagtcctcatcatcagccaggcccggcgacggaggagaggcgggagatgggccggaggaaggggagattgtgggcgattccaacgaaatgcccaaccccgacaagggcttggttttgaagcacccattagagaactcttggaccttctggtttgataacccctctgccaagtccaaacagaccacttggggcagcaatattcaacccatctatactttctccaccgttgaagatttttggagtgtttacaataatatacaccatccgagcaagttgtctgtaggggcagacttccattgtttcaagaataaaatcgagccaaaatgggaagatccagtctgtgctaatggaggaaagtggacaatgacctttccgaaggggaaatctgacacctgctggctgtatacgctgttggcaatgattggagaacaatttgaccatggagatgaaatatgtggagctgtggtcaatgtccgtgctagacaggaaaaaatagctatatggaccaaaaatgctgcaaatgaagcagctcaggttagtattgggaagcaatggaaggagtttctggattacaaagacgcaattggcttcatatttcacgacgatgcaaagagacttgacaggggtgccaagaatcgttacacagtataatcaatcctgcacgttcatatcaaccaactgcaagatatcgtcgtggataaggcggggaaatattccgagtattagaccttatgtgctagttttccagtggtcactatgattttggagcaaagtttttgctgtcttttgctttgtgcaacatatttctttacaaatgtgctatggttgcactcaatttagtattgttctgtcctccaatatgcaatacagtgcacctaatgttataactcttcatttcatattctgtcatgttaaatgtagttggtttctctcaaagacca

SEQ ID NO: 621 - protein, 231 aa, Ipomoea nil
MVEELEKSTKPEEPEKSSSSARPGDGGEAGDGPEEGEIVGDSNEMPNPDKGLVLKHPLENSWTFWFDNPSAKSKQTTWGSNIQPIYTFSTVEDFWSVYNNIHHPSKLSVGADFHCFKNKIEPKWEDPVCANGGKWTMTFPKGKSDTCWLYTLLAMIGEQFDHGDEICGAVVNVRARQEKIAIWTKNAANEAAQVSIGKQWKEFLDYKDAIGFIFHDDAKRLDRGAKNRYTV

SEQ ID NO: 622 - DNA, 953 bp, Lactuca perennis
cgcgggagagctggctattggcactggcaagccaaaggaagccttgggctcacccttgggtcgagttatgcctcttactaagcccaacctgccctggccgtagggagatacaaattttctgtccattcttcatcgcctcatcggtaatcgcagatcaatcgagttctagagagagaaacagaattctaaagaaagatggtggaagaagtaatgaaatcggaggagcagaagttaatcgatgtcaacaagcacaggggtgttcgatccgacgtagaagaagatgaacaactggaagagggagagattatcggtggcgacggggataccctatcggcttcctcttcttccaggcctggtacggccatagcacagcatccgctcgagcattcttggacgttctggttcgatactccagctgctaagtccaagcaagtcgcttggggtagttctatgcgccccatctacactttctcctccgttgaagagttctggagtctttacaacaacatacatcgaccaagcaagttggctcaaggagctgacttctattgtttcaagaataaaatcgagcctaagtgggaagaccctgtttgtgctaatggtggaaagtggactatgacctttaccaaaacaaaatccgacacctgttggctgtatacgttgctagcaatgattggagagcagtttgatcatggagatgatatatgtggagcagttgtaaatgttagagcaaggcaagaaaaaatagctttgtggaccaaaaatgctgcgaatgagagtgctcagctaagcattgggaaacaatggaaggagtttattgattacaatgataccataggctttatatttcatgaagatgcgcagactcttgatagatatgctaaaaaaaaatacacagtttgaggtgtgtgtatgttttgtctagtgcctaatatgcaatctcttttgtgttg

SEQ ID NO: 623 - protein, 235 aa, Lactuca perennis
MVEEVMKSEEQKLIDVNKHRGVRSDVEEDEQLEEGEIIGGDGDTLSASSSSRPGTAIAQHPLEHSWTFWFDTPAAKSKQVAWGSSMRPIYTFSSVEEFWSLYNNIHRPSKLAQGADFYCFKNKIEPKWEDPVCANGGKWTMTFTKTKSDTCWLYTLLAMIGEQFDHGDDICGAVVNVRARQEKIALWTKNAANESAQLSIGKQWKEFIDYNDTIGFIFHEDAQTLDRYAKKKYTV

SEQ ID NO: 624 - DNA, 857 bp, Lactuca saligna
  misc_feature (814)..(814): n is a, c, g, or t
cggcggggagatcaattttctgttcctcttcatcttcatcggtaattgcagatcaaccgagttctagagagagaacagaattctagagaaagatggtggaagaaataatgaaatcggaggagcagaagttgatcgatgtcaacaagcacaggggtgttcgatcagatggagaagaagatgaacaactggaagagggagagattgtcggtggcgacgcggataccctatcgtcttcctcttcttccaggcctggtacggccatagctcagcatccgcttgagcattcttggactttctggttcgatactccctctgctaagtccaagcaagtcgcttggggtagttccatgcgccctatctacacattctcctctgttgaagagttctggagtctttacaacaacatacatcgaccaagcaagttggctcaaggagccgacttctactgtttcaagaataaaatcgagcctaagtgggaagaccctgtctgtgctaatggcggaaagtggactatgacctttaccaaagcaaaatccgacacctgttggctgtatacgttgctagcaatgattggagaacagtttgatcatggagatgatatatgtggagcagttgtaaatgttagatcaaggcaagaaaaaatagctttgtggaccaaaaatgctgccaatgagagtgctcagctaagcattgggaaacaatggaaggagtttattgattacaatgataccataggctttatatttcatgaagatgcgaagactcttgatagaagtgctaaaaacaaatacacagtatgaggtgtgtctatgtntgtctagtgcctaatatggaatgaatctcttttgtattgatga

SEQ ID NO: 625 - protein, 235 aa, Lactuca saligna
MVEEIMKSEEQKLIDVNKHRGVRSDGEEDEQLEEGEIVGGDADTLSSSSSSRPGTAIAQHPLEHSWTFWFDTPSAKSKQVAWGSSMRPIYTFSSVEEFWSLYNNIHRPSKLAQGADFYCFKNKIEPKWEDPVCANGGKWTMTFTKAKSDTCWLYTLLAMIGEQFDHGDDICGAVVNVRSRQEKIALWTKNAANESAQLSIGKQWKEFIDYNDTIGFIFHEDAKTLDRSAKNKYTV

SEQ ID NO: 626 - DNA, 1159 bp, Lactuca sativa
aatccaggggtcttacgtcaatacctcatcgttcattattgtgtaagacctagaaattaagacagcagaatgggggatcggtaattgcagatcaactgagttctagagagagaaacagaattctagagaaagatggtggaagaaataatgaaatcggaggagcagaagttgatcgatgtcaacaagcacagaggtgttcgatcagacggagaagaagatgaacaactggaagagggagagattgtcggtggcgacgcggataccctatcgtcttcctcttcttccaggcctggtacggccatagctcagcatccgctcgagcattcttggactttctggttcgatactccctctgctaagtccaagcaagtcgcttggggtagttccatgcgccctatctacactttctcctccgttgaagagttctggagtctttacaacaacatacatcgaccaagcaagttggctcaaggagctgacttctattgtttcaagaataaaatcgagcctaagtgggaagaccctgtttgtgctaatggtggaaagtggactatgacctttaccaaagcaaaatccgacacctgttggctgtatacgttgctagcaatgattggagaacagtttgatcatggagatgatatatgtggagcagttgtaaatgttagagcaaggcaagaaaaaatagctttgtggaccaaaaatgctgcgaatgagagtgctcagctaagcattgggaaacaatggaaggagtttattgattacaatgataccataggctttatatttcatgaagacgcgaagactcttgatagaagtgctaaaaacaaatacacagtatgaggtgtggttatgtttgcttagtgcctaatatggaatgaatatcttttgtattgatgaatcttgactattttcattcccgatttatgctacaattctgcaaggagtttattctatcctactgttagttttttttgggtgttatgatattaaaagaaaagatttgtagtgatgaggagtttgaacatttgggaattgaaatgagtaacaaaaacttgtagcaactctcttttttaacaccctgcatttggtttttgtttagatatttgataagtttgtgtaatttttaactttttgtgattaaaggtgtgctttttagtgc

SEQ ID NO: 627 - protein, 235 aa, Lactuca sativa
MVEEIMKSEEQKLIDVNKHRGVRSDGEEDEQLEEGEIVGGDADTLSSSSSSRPGTAIAQHPLEHSWTFWFDTPSAKSKQVAWGSSMRPIYTFSSVEEFWSLYNNIHRPSKLAQGADFYCFKNKIEPKWEDPVCANGGKWTMTFTKAKSDTCWLYTLLAMIGEQFDHGDDICGAVVNVRARQEKIALWTKNAANESAQLSIGKQWKEFIDYNDTIGFIFHEDAKTLDRSAKNKYTV

SEQ ID NO: 628 - DNA, 956 bp, Lactuca serriola
ttttctgttcctcttcatcggtcgggggcgatcactgagttctagagagagaacagaattctagagaaagatggtggaagaaataatgaaatcggaggagcagaagttgatcgatgtcaacaagcacagaggtgttcgatcagacggagaagaagatgaacaactggaagagggagagattgtcggtggcgacgccgataccctatcgtcttcctcttcttccaggcctggtacggccatagctcagcatccgctcgagcattcttggactttctggtttgatactccctctgctaagtccaagcaagtcgcttggggtagttccatgcgccctatctacactttctcctccgttgaagagttctggagtctttacaacaacatacatcgaccaagcaagttggctcaaggagctgatttctattgtttcaagaataaaattgagcctaagtgggaagaccctgtttgtgctaatggtggaaagtggactatgacctttaccaaagcaaaatccgacacctgttggctgtatacgttgctagcaatgattggagaacagtttgatcatggagatgatatatgtggagcagttgtaaatgttagagcaaggcaagaaaaaatagctttgtggaccaaaaatgctgcgaatgagagtgctcagctaagcattgggaaacaatggaaggagtttattgattacaatgataccataggctttatatttcatgaagacgcgaagactcttgatagaagtgctaaaaacaaatacacagtatgaggtgtggttatgtttgcttagtgcctaatatggaatgaatatcttttgtattgatgaatcttgactattttcattcccgatttatgctacaattctgcaaggagtttattctatcctactggtagttttttttgggtgttatgatataaaaagaaaagattgtagtgatgaggagttt

SEQ ID NO: 629 - protein, 235 aa, Lactuca serriola; identical to SEQ ID NO: 627

SEQ ID NO: 630 - DNA, 878 bp, Lactuca virosa
cggggatttatggtattgcgatcaactgagttctagagagagaaacagaattctagagaaagatggtggaagaaataatgaaatcggaggagcagaagttgatcgatgtcaacaagcacaggggtgttcgatcagacggagaagaagatgaacaactggaagagggagagattgtcggcggcgacgcggataccctatcgtcttcctcttcttccaggcctggtacggccatagctcagcatccgctcgagcattcttggactttctggttcgatactccgtctgctaagtccaagcaagtcgcttggggtagttccatgcgccctatctacactttctccaccgttgaagagttctggagtctttacaacaacatacatcgaccaagcaagttggctcaaggagctgacttctattgtttcaagaataaaatcgagcctaagtgggaggaccctgtttgtgctaatggtggaaagtggactatgacctttaccaaagcaaaatccgacacctgttggctgtatacgttgctagcaatgatcggagaacagtttgatcatggagatgatatatgtggagcagttgtaaatgttagagcaaggcaagaaaaaatagctttgtggaccaaaaatgctgccaatgagagtgctcagctaagcattgggaaacaatggaaggagtttattgattacaatgataccataggctttatatttcatgaagatgcgaagactcttgatagaagtgctaaaaacaaatacacagtatgaggtgtggctatgtttgtctagtgcctaatatggaatgaatatcttttgtattgatgaatgtacttgaatcttgactattttcattacccgattatgctaccattctgc

SEQ ID NO: 631 - protein, 235 aa, Lactuca virosa
MVEEIMKSEEQKLIDVNKHRGVRSDGEEDEQLEEGEIVGGDADTLSSSSSSRPGTAIAQHPLEHSWTFWFDTPSAKSKQVAWGSSMRPIYTFSTVEEFWSLYNNIHRPSKLAQGADFYCFKNKIEPKWEDPVCANGGKWTMTFTKAKSDTCWLYTLLAMIGEQFDHGDDICGAVVNVRARQEKIALWTKNAANESAQLSIGKQWKEFIDYNDTIGFIFHEDAKTLDRSAKNKYTV

SEQ ID NO: 632 - DNA, 808 bp, Malus domestica
ctagcattgccctaaccaaaaaaggcaactgtttcacattgggcacaaaagaaacgccgggaaagaaaagagagcaagaaactcctccgcaaaccgtaacaatggtggtcgaagatgcacccaagacttcagcatcagaagatcaggccaagaccgaggcgaacgctaagccgagggaggaggacgacgagcccgaagaaggagaaatcgttggcgaccaagactcggcgtcgtcgaagccttcgaagggaattgcgccgcagtctcacgccctggagcactcctggaccttctggttaaaaagcgctgccgcaaagtccgtcaagtccaagcaggaggattggggcagctccatccgcccgatctacaccttcactaccgtcgaggagttctggagcatttacaacaaaataggtcatcctagcaagttcaatgcggggacggatttccattgtttcaaatacaaaattgagccaaagtgggaggatcctgtgtgtgctaatggaggaaagtggactgtcacctatcctaaagggaaatctgatacctcttggttgtatacgttgctagcaatgataggagaacagtttgatcatggagatgaaatctgtggagcagttgtcagtgtcagaaaaagcctagaaaaaataactctttggaccaagaatgcaacaaatgaagctgctcaggtgagcattgggaaacaatggaaggggtttctggactacaatgaaactattgggttcatatttcatgaggatgcgaatagacttgggagaggtgccaagaataaatacgtagcctgatg

SEQ ID NO: 633 - protein, 234 aa, Malus domestica
MVVEDAPKTSASEDQAKTEANAKPREEDDEPEEGEIVGDQDSASSKPSKGIAPQSHALEHSWTFWLKSAAAKSVKSKQEDWGSSIRPIYTFTTVEEFWSIYNKIGHPSKFNAGTDFHCFKYKIEPKWEDPVCANGGKWTVTYPKGKSDTSWLYTLLAMIGEQFDHGDEICGAVVSVRKSLEKITLWTKNATNEAAQVSIGKQWKGFLDYNETIGFIFHEDANRLGRGAKNKYVA

SEQ ID NO: 634 - DNA, 861 bp, Manihot esculenta
ctctctccataacctaccgaaccgagagcaagaagcagcagcaagcagcagagaaaattaacgcaaaaatggcggcggaagagccattgaaatcaactactgaagaaacaccgaatccaaaccttaactctaatcctagggcactagatgacgttaatgatgatgagccggaagaaggagagatcgtcggagatgaggaatcatccgccaagaaatccagcgctgtaacctaccagccgcaccctctcgagcatcagtggacgttctggttcgataaccctactgctaagtctaagcaagccacctggggaagctctatgcgttctatctatacttttgctactgttgaggagttttggagcatttacaataatatccatcatccaagcaagttggctgtgggggctgactttcactgtttcaaatataaaatcgaaccaaaatgggaggaccctgtttgtgctaatggagggaagtggactgtaacttttggtagagggaaatctgataccagttggttgtatacgttgctggctatgattggagaacaatttgatcatggagatgaaatctgtggggcagttgtcaatgtcagaattaagcaggaaaagatagctctttggaccaagaatgcttcaaatgaagctgctcagctgagcattggaaaacaatggaaggaatttctcgactacaatgatactatcgggtttatattccatgaagacgcaaagaagcatgacagaggtgccaagaatcgctacacaatatgagctgtacagagtatatgaaagtgtttccatgagccctgcctattactagtctgcgacatctattgactgcttacatctttggagcatctca

SEQ ID NO: 635 - protein, 233 aa, Manihot esculenta
MAAEEPLKSTTEETPNPNLNSNPRALDDVNDDEPEEGEIVGDEESSAKKSSAVTYQPHPLEHQWTFWFDNPTAKSKQATWGSSMRSIYTFATVEEFWSIYNNIHHPSKLAVGADFHCFKYKIEPKWEDPVCANGGKWTVTFGRGKSDTSWLYTLLAMIGEQFDHGDEICGAVVNVRIKQEKIALWTKNASNEAAQLSIGKQWKEFLDYNDTIGFIFHEDAKKHDRGAKNRYTI

SEQ ID NO: 636 - DNA, 678 bp, Medicago truncatula
atggttgtagaagaaaccccaaaatccatcgacgatcaaatcacaaaccctaaaatcgaagacatcaacaacgatctcgaagaaggagagatcaacgacgatgattcctccgccatttcgaaacccctcaccgccggtcaccaatctcaccctcttgagaattcctggactttctggttcgataaccctcagactaaatccaaacaacaagcttggggtagttcgattcgacccgtctacactttttctactgttgaagagttttggagcatttacaataacattcaccatcctagcaagttggctattggagctgatttccattgtttcaagcataagattgaaccaaaatgggaagaccctatttgtgctaatggtggaaaatggactgtgcaattttctaggggaaaatctgatactagctggttgtatacgttgttggcaatgattggagagcaatttgatcatggagatgaaatttgtggagcagttgtgaatgtcaggagtagggcggaaaaaatttctatatggactaagaatgctgctaatgaagctgctcaggtgagcatcggaaaacagtggaaggagtttcttgattataatgaaaccattggctttatatttcatgatgatgcaaagaagcttgacagagctgctaaaaacaaatatgttgtatga

SEQ ID NO: 637 - protein, 225 aa, Medicago truncatula
MVVEETPKSIDDQITNPKIEDINNDLEEGEINDDDSSAISKPLTAGHQSHPLENSWTFWFDNPQTKSKQQAWGSSIRPVYTFSTVEEFWSIYNNIHHPSKLAIGADFHCFKHKIEPKWEDPICANGGKWTVQFSRGKSDTSWLYTLLAMIGEQFDHGDEICGAVVNVRSRAEKISIWTKNAANEAAQVSIGKQWKEFLDYNETIGFIFHDDAKKLDRAAKNKYVV

SEQ ID NO: 638 - DNA, 1182 bp, Nicotiana tabacum
gaaggaaacaggattttataggcccattgtttgaagagcagggatatttttgataccaaaagataatgaagggcaaaagtaatctattttcgatagttgaagggtaattttgacactttatcgaggaaacattgaacttttcctacgaatacaaattcggaatttctgtgagaagttacacatattcagttgaaacccatcaccaaaagtccaaaatcacaaatttccagacgaaagctatagtgttgagaacaccaaaatggttgatgaagtagagaaaccggtgtcgttagaggaatcgaagactaatactcgtgaggtggaagaggaaggagagatcgtgggggaatcagacgatacgatgtcgtctttagggaacccaagcatggcaatgaaacacgcgctagaacattcatggacattttggttcgataacccatcagggaaatcaaaacaggctgcttggggtagttccattcgaccaatttacaccttctccactgtcgaagatttttggagtgtgtacaacaatatccaccacccaagcaaattggctgtgggggcagactttcactgttttaagaataaaattgagccaaagtgggaggatcctgtctgcgccaacggaggaaagtggacaatgagcttttcgaggggtaaatctgatacctgctggctgtatacgctgctggctatgattggagaacaatttgactgcggagatgaaatttgtggagctgttattaatgttcgagttagacaagaaaaaatagctttgtggaccaggaatgctgccaatgaaacagctcaggtgagcattggtaaacagtggaaggaatttctggattacaatgactcggttggctttatatttcatgatgatgcaaagaagctagacagagctgccaagaatcgttattctgtgtagttctatcgttacaataggaattgtgaacgacacagttactgagaagcagtcacctgtggctgcctgttttgaccgcttacattggtattcacagttttcataaggaaatttgtttggttttgaagcatctaatgcctttacaactttgggcatatatgacttgcattagtaccgataccacacaggatttagttgcaacatctttgaaattgacagcatttggcatgttgtgcatgcgtttactttcctttcca

SEQ ID NO: 639 - protein, 222 aa, Nicotiana tabacum
MVDEVEKPVSLEESKTNTREVEEEGEIVGESDDTMSSLGNPSMAMKHALEHSWTFWFDNPSGKSKQAAWGSSIRPIYTFSTVEDFWSVYNNIHHPSKLAVGADFHCFKNKIEPKWEDPVCANGGKWTMSFSRGKSDTCWLYTLLAMIGEQFDCGDEICGAVINVRVRQEKIALWTRNAANETAQVSIGKQWKEFLDYNDSVGFIFHDDAKKLDRAAKNRYSV

SEQ ID NO: 640 - DNA, 1017 bp, Nicotiana tabacum
cattacggccgggggaaccaaagaaaaactacaagtacccttttcctactaaaatctataactaagtacatagaaaacacacgaaaatggcagaggaagctgagaaattgcgggtagatgaagtagaagtagtcgacgatggacctgaagaaggagaaattgtggatgaatctgatgatacggcgtcgtatttgggcaaagaaatcaaacctaagcatccattagagaattcttggactttttggtttgataatcctatggctaaatctagacaagctgcttggggcagttcccttcgcgaactttacactttttccactgtcgaagatttttggggtgtttacaataatatcaaccacccaagcaagttagttgtgggagcagactttcattgttttaagcataaaattgagccaaagtgggaagatcctgtatgtgcgaatggagggaattggacaatgagctttagtaagggtaaatctgataccagctggctatacacgctgctggcaatgattggacatcaattcgatcatggagaggaaatttgtggagcagtagttagcgtccgaaataagggggataaaatagctttatggaccaagaatgctgcaaatgaaacagctcaggttagcattggtaagcaatggaaggagtttctggattacagcaactcgattggcttcatatttcatgacgactcaatgaggctcggcagaggtgccaagaatcgttatacagtatagttttcttgctacaatgggggaatgcaagaaacagaatctggactggaaagtttatagacattagctctgtttgtacaatcatctatcatatgaaaggctgccacttgacagtttaagtacctttgttttagtgtttgtacttttaatcgaagaaactcgtttggttttgaattaatgccttaacaataaactttagtgctgtctcttcttctaacaacttgttttaacaatatcgtttcatgatgtattatatagtataatattgtattgt

SEQ ID NO: 641 - protein, 219 aa, Nicotiana tabacum
MAEEAEKLRVDEVEVVDDGPEEGEIVDESDDTASYLGKEIKPKHPLENSWTFWFDNPMAKSRQAAWGSSLRELYTFSTVEDFWGVYNNINHPSKLVVGADFHCFKHKIEPKWEDPVCANGGNWTMSFSKGKSDTSWLYTLLAMIGHQFDHGEEICGAVVSVRNKGDKIALWTKNAANETAQVSIGKQWKEFLDYSNSIGFIFHDDSMRLGRGAKNRYTV

SEQ ID NO: 642 - DNA, 1034 bp, Nicotiana tabacum
cggggaggaaagtcttgaaccaaagaagaactacaagtacccttttcctactaaaatctatagctaaaagcaagcaaagtacatcgaaaacacacgaaaatggcagaggaatctgagaaattgcgggtagatgaagtagaagtagccgacgatggacctgaagaaggagaaatcgtgggggaatcagatgatacggcgtcgtatttgagcaaagaaatcaaagctaagcacctgttggagaattcttggactttttggtatgataaaaatacgaaatctagacaagctgcttggggtagcttccttcgcgaagtttacactttttccactatcgaagatttttggggtgtttacaataatatcaaccacccaagcaagttagttacgggagcagactttcattgttttaagcataaaattgagccaaagtgggaagatcctgtatgtgcgaatggagggaagtggacaatgagctttagtaagggtaaatctgataccagctggctatacacgctgctggcaatgattggacatcaattcgatcatggagatgaaatttgtggagcagtagttaatgtccgaggtaaggaggataaaatagctttatggaccaagaatgctgcaaatgaaacagctcaggttagcattggtaagcaatggaaggagtttctggattacagcgactcgattgacttcatatttcatgaagacgcagagaggcacggcagaggtgccaagaatcgttatacagtgtagttttcttgctacaatgggggaatgcaagaaacagaatctggactggaaagtttatagacattagctctgtttgtacaatcatctatcatatgataagctgccacttgacagttttagtcctgcctctttttctaacaacttgtttgaatagttgttatgtatcgttttcataatgtaacatatcgtattgtattgtatcgttttgatgtatcaaaacaaatattgtatttaaagtaacaatacgataccatacaataggtaacaaccatccaaacaag

SEQ ID NO: 643 - protein, 218 aa, Nicotiana tabacum
MAEESEKLRVDEVEVADDGPEEGEIVGESDDTASYLSKEIKAKHLLENSWTFWYDKNTKSRQAAWGSFLREVYTFSTIEDFWGVYNNINHPSKLVTGADFHCFKHKIEPKWEDPVCANGGKWTMSFSKGKSDTSWLYTLLAMIGHQFDHGDEICGAVVNVRGKEDKIALWTKNAANETAQVSIGKQWKEFLDYSDSIDFIFHEDAERHGRGAKNRYTV

SEQ ID NO: 644 - DNA, 740 bp, Populus deltoides
ggcacgaggcttgaaggaacgaaaacaaaggaaatatggatgttgaagacccacaaaaattagcaacagaaaaaactccaaaccctaacaccgaagacgatctagaagaaggagagatcgttgcgggaggagatgacgactcgtcgttaaagaaatcagtttctttaccataccagcctcacccacttgaacatcaatggactttctggttcgataatccatctgccaaatccaaacaagccagttggggtagcagcctgcgctccatcttcactttttctactattgaggagttttggagtgtttacaacaatatacatcacccgagcaagctggctgttggagcagacttccattgcttcaaagataaaattgagccaaaatgggaggaccctatttgtgctaatggagggaagtggagtgtaactcttagtaaaggaaaatctgatactttttggttgaatacgttgttggcaatgattggagagcagtttgatcatggagatgaaatttgtggagcagtggtcagtgtgagggctaggcaggaaaagattgctatctggactaagaatgcttcaaatgaagctgctcaggtgagcattggaaaacagtggaaggagtttctcgattacaatgagactattgggttcatattccatgatgatgcgaagaaagacagaaatgccaagaatcgctactcagtgtgacttgtagagtcttttcgtgaaaggtggcatgtt

SEQ ID NO: 645 - protein, 223 aa, Populus deltoides
MDVEDPQKLATEKTPNPNTEDDLEEGEIVAGGDDDSSLKKSVSLPYQPHPLEHQWTFWFDNPSAKSKQASWGSSLRSIFTFSTIEEFWSVYNNIHHPSKLAVGADFHCFKDKIEPKWEDPICANGGKWSVTLSKGKSDTFWLNTLLAMIGEQFDHGDEICGAVVSVRARQEKIAIWTKNASNEAAQVSIGKQWKEFLDYNETIGFIFHDDAKKDRNAKNRYSV

SEQ ID NO: 646 - DNA, 1001 bp, Prunus persica
ctttactgagaaaacacaaaacgaaacgccaagaaagaaaagcgagcaagaaaaagagccaatccaagcaagccctaaaaatggtggtcgaagacgcacccaagacttcagcttcagaagatcaggccaagaccgagacgaaccctaaaccaagggaagaggacgatgagcccgaagaaggagagatcgtgggcgacgaagaatcggcgtcgaagccatcgaaaggaatagcgccacagtctcatgctctggagcactcatggaccttctggttcgatagccccgcagcaaagtccgctaagactaagcaagaggattgggggagttccattcgcccgatctataccttcagtaccgtcgaggagttctggagcatttacaataatatacgtcatccaagcaagttggctcttggcacggacttccattgtttcaaatataaaattgagccaaagtgggaggatcctgtgtgtgctaatggagggaagtggactgtaacttttcctaaagggaaatctgatacttcttggctgtatacgttgctaggaatgataggagaacagtttgatcatggagatgaaatttgtggagcagttgtcaacgtcagaaataggcaagaaaagatatctatttggacgaagaatgcaataaatgaagctgctcagctgagcattgggaaacagtggaaggggtttctggattacaatgaaactatagggttcatatttcatgaggatgcaatgagacaagagagaagtgccaaaaataaatacgtagcctgatgtgtatattgttctttgctagtacttgatgctttctaactgcaacagcattctatgctgagatgcagagtaacttctggttaacttctggttcacaattacagattttagacttttcttcgaatttacattttaagatgtacaatggatatgagctgtttactttctacaaaatgttttgcttgcatcttgaagtagtttgattaagttattgctcct

SEQ ID NO: 647 - protein, 233 aa, Prunus persica
MVVEDAPKTSASEDQAKTETNPKPREEDDEPEEGEIVGDEESASKPSKGIAPQSHALEHSWTFWFDSPAAKSAKTKQEDWGSSIRPIYTFSTVEEFWSIYNNIRHPSKLALGTDFHCFKYKIEPKWEDPVCANGGKWTVTFPKGKSDTSWLYTLLGMIGEQFDHGDEICGAVVNVRNRQEKISIWTKNAINEAAQLSIGKQWKGFLDYNETIGFIFHEDAMRQERSAKNKYVA

SEQ ID NO: 648 - DNA, 897 bp, Pisum sativum
ggagaaagaaaccgagagagagcaaaaatggttgtagaagacacccccaaatccatcatcaccgacgatcaaatcacaacaaaccctaatcgcgttatcgaagacgacaacaatcttgaagaaggagagatcctcgatgaagacgattcctccgccacttccaaacccgtcgtccaccaacctcacctcctcgagaattcttggactttctggtttgatacccccgcagcaaaatccaaacaagccgattggggtagctcaatgcgacccatctacactttctccactgttgaagagttttggagcatttacaataacattcatcatcctggtaagttggctgtgggagcagatttctattgtttcaagcataaaattgaacctaaatgggaggatcccatttgtgctaatggtgggaaatggactgcgaactatccgaagggaaaatctgataccagttggttatacacgttgttggcaatgattggagaacaatttgatcatggagatgaaatttgcggagcggttgtgaatgtaaggggtagggctgagaagatttctatttggactaagaatgcttcaaatgaagctgctcaggtgagcattggaaaacagtggaaggagtttcttgattataatgagaccatgggctttatatttcatgatgatgcaaggaaactcgacagaaatgctaaaaacaaatatgttgtgtgaactgtattgcgttcttacatggtagcaaactagcaattgcatgagatgcctctccgatattcaacatgttgcttaatgctttctaagccttttaaatctcgtattgagtagtatttccagatttgtgtgcggataatcttttgactgtagacgatgtttcatcaataatagagtgatttagtc

SEQ ID NO: 649 - protein, 228 aa, Pisum sativum
MVVEDTPKSIITDDQITTNPNRVIEDDNNLEEGEILDEDDSSATSKPVVHQPHLLENSWTFWFDTPAAKSKQADWGSSMRPIYTFSTVEEFWSIYNNIHHPGKLAVGADFYCFKHKIEPKWEDPICANGGKWTANYPKGKSDTSWLYTLLAMIGEQFDHGDEICGAVVNVRGRAEKISIWTKNASNEAAQVSIGKQWKEFLDYNETMGFIFHDDARKLDRNAKNKYVV

SEQ ID NO: 650 - DNA, 981 bp, Populus trichocarpa
atatggatgttgaagacccacaaaaattagcaacagaaaaaactccaaaccctaacaccgaagacgatctagaagaaggagagatcgttgcaggaggagatgacgactcatcgttaaagaaatcagtttctttaccataccagcctcacccacttgaacatcaatggactttctggttcgataatccatctgccaaatccaaacaagccagttggggtagcagcctgcgctccatcttcactttttctactattgaggagttttggagtgtttacaacaatatacatcacccgagcaagctggctgttggagcagactttcattgcttcaaagataaaattgagccaaaatgggaggaccctatttgtgctaatggagggaagtggagtgtaactcttagtaaaggaaaatctgatactttttggttgaatacgttgttggcattgattggagagcagtttgatcatggagatgaaatttgtggagcagtggtcagtgtgagggctaggcaggaaaagattgctatctggactaagaatgcttcaaatgaaactgctcaggtgagcattggaaaacagtggaaggagtttctcgattacaatgagactattgggttcatattccatgatgatgcgaagaaagacagaaatgccaagaatcgctactcagtatgacttgtagagtctattcttgaaaggttcatgttaggcggatgcttcgtaatgcaggactcggcatggtagaagtttagatgcatattagggttctggaacttttgattgactttttgtgtttgcctggtctgctataattttagttgtacaacaccagcatcatcttcttctttctttttattattgttttatgttttgagttgattttctggtctttgaatccgaaatgattggttatcttggaaattgtgaacgcgcatgaactgcccagtttgtgagtgaacatgttaggaacttgtaatcccaa

SEQ ID NO: 651 - protein, 223 aa, Populus trichocarpa
MDVEDPQKLATEKTPNPNTEDDLEEGEIVAGGDDDSSLKKSVSLPYQPHPLEHQWTFWFDNPSAKSKQASWGSSLRSIFTFSTIEEFWSVYNNIHHPSKLAVGADFHCFKDKIEPKWEDPICANGGKWSVTLSKGKSDTFWLNTLLALIGEQFDHGDEICGAVVSVRARQEKIAIWTKNASNETAQVSIGKQWKEFLDYNETIGFIFHDDAKKDRNAKNRYSV

SEQ ID NO: 652 - DNA, 868 bp, Rosa hybrid
gagagaagagagagaatcaaaacgcgagaaaagacgaacgaaacggcagagaggggaagagagtgagggaagccctagaaagcatggcggtggaagacgcaggctctccagcttcggaagatcagagcaagacggagtcgaaccctaaatcaatgcaagacgagaacgagctggaagaaggagagatcgtcggcggcggcggcgacgaggtgtcttcgaagatcgcaaagccgctgcaccaccctctggagcactcatggaccttctggttcgatagcccctcggccaagaactccaagcccaaacaagaggattggggcagctctattcgcccgatctacaccttctctactgttgaggaattctggggtatatataataatatacgccatccaagcaagttgtctatggggacggacctccattgtttcaaaaacaaaattgagcctaagtgggaggatcctgtttgtgctaatggagggaaatggactctaacttttactaaagggaaatctgatcatccctggctgcatacgttgctagcactgattggggaacagtttgatcatggagatgaaatatgtggagcagttgtcaatgtcagaagttggcaagaaaaaattgctatttggaccaagaatgcagcaaatgaggctgctcagttgagcattggaaaacaatggaagggctttctggataaacacgaagctataggcttcatatttcatgacgatgcaaggcgacaggagagaggtgcccagaatagatacacagtgtgatctgtatagggctcgtttctagtactcaaatgttttctgaacccgagcattgtatgctttagctgcgagagtgaccaggtcttgctaac

SEQ ID NO: 653 - protein, 231 aa, Rosa hybrid
MAVEDAGSPASEDQSKTESNPKSMQDENELEEGEIVGGGGDEVSSKIAKPLHHPLEHSWTFWFDSPSAKNSKPKQEDWGSSIRPIYTFSTVEEFWGIYNNIRHPSKLSMGTDLHCFKNKIEPKWEDPVCANGGKWTLTFTKGKSDHPWLHTLLALIGEQFDHGDEICGAVVNVRSWQEKIAIWTKNAANEAAQLSIGKQWKGFLDKHEAIGFIFHDDARRQERGAQNRYTV

SEQ ID NO: 654 - DNA, 945 bp, Sorghum bicolor
cagagccaaccccaaacctccgacttgccgcacccgcacccgccccatccgccgccgctgctgccgccatggccgacgagatcgacacgaggccggcctccgcgggctcccggggccgccccgcgcacgctacggaggacgacgacagggaggagggagagatcgccgacgacacccccgcgcccgccctccccgtcacgcacccgctcgagcactcatggaccttctggttcgacaacccgcagggcaagaacaagcaggccgcctgggggagctccatccgacccatccacaccttctccaccgtcgaggacttctggggcctttacaataatattcatcaccctagcaagttggtcattggagctgacttccattgcttcaagaacaagattgaaccaaaatgggaagaccctatttgtgctaatggcggtaaatggaccatcagctgtggaagagggaaatctgacacactgtggctgcacactctgttggctatgattggcgaacaattcgactatggtgatgaaatttgtggagcagtcgtcagcgtgcgtggcaagcaggaaagaatagctatctggacaaaaaatgctgctaatgaagctgctcagataagcatcgggaagcagtggaaggaattcctggattacaaggactccattggattcattgttcatgacgatgcaaagaaggcggacaagggaccaaggaaccgatacacggtttgatcctgttgctagaaatctcagagtgtagcatgcgcacgtgtagggtggttctatccgaatctaatgcagacatgcagtagcaccttgcagagtttagactctagtgttgaaggttctctatttgctgaggagttgcttaagcataatctaacatgttgaatgtatttcctgtatgttccataaacataatctaacactcggttgttgtttcgtc

SEQ ID NO: 655 - protein, 220 aa, Sorghum bicolor
MADEIDTRPASAGSRGRPAHATEDDDREEGEIADDTPAPALPVTHPLEHSWTFWFDNPQGKNKQAAWGSSIRPIHTFSTVEDFWGLYNNIHHPSKLVIGADFHCFKNKIEPKWEDPICANGGKWTISCGRGKSDTLWLHTLLAMIGEQFDYGDEICGAVVSVRGKQERIAIWTKNAANEAAQISIGKQWKEFLDYKDSIGFIVHDDAKKADKGPRNRYTV

SEQ ID NO: 656 - DNA, 985 bp, Solanum habrochaites
cagttaaaaacaccaaaaatggctgatgaactaaacaaagctgctttagaggaatacaagtcgtcatctgtagaagacggaggtgaggaaggagagatcataggggaatcggatgataccgcttcgtctttagggaaacaaatcactatgaaacatccactagaacattcctggacattttggttcgataacccttcagggaaatcgaaacaagctgcttggggtagttctattcgccccatttacaccttctccactgctgaagatttttggagtgtgtacaacaacatccaccacccaagcaagttggccgtgggtgcagacttccattgttttaaaaataaaatcgagccaaagtgggaggatcctgtatgtgccaatggagggaaatggacaatgaacttttctaggggtaaatctgatacctgctggctgtatacgcttctggcactgattggagagcaatttgattatggagatgaaatttgtggagcggttattaatgttcgagttagacaagaaaaaatagctctgtggaccaggaatgctgccaatgaaacagctcaggtgagcattggtaaacaatggaaagagtttttggattacaatgacacaattggctttatatttcatgatgatgcaaagaagcttgaccgagctgccaagaatcgttattccgtgtagttctatcgttacaacagggaatgcaattaatagagttacaggtagtatagttgttttactgaagaatcagcggtcacttacggctgcatgttttacctcttgcattggcattgccaattttcgtatagggaaattgtttggttttgaagctttttgatgacttaacaattggtcatatgcgacttgtattagtaccgatgttatagaggtattttgctatttctgcgaaaggaacagcacttagcattcgtatgtatgtgtttcgctttaaggggcaatccaacttactctttgaggggtc

SEQ ID NO: 657 - protein, 221 aa, Solanum habrochaites
MADELNKAALEEYKSSSVEDGGEEGEIIGESDDTASSLGKQITMKHPLEHSWTFWFDNPSGKSKQAAWGSSIRPIYTFSTAEDFWSVYNNIHHPSKLAVGADFHCFKNKIEPKWEDPVCANGGKWTMNFSRGKSDTCWLYTLLALIGEQFDYGDEICGAVINVRVRQEKIALWTRNAANETAQVSIGKQWKEFLDYNDTIGFIFHDDAKKLDRAAKNRYSV

SEQ ID NO: 658 - DNA, 681 bp, Solanum habrochaites
atggagagaacgatgtcgtttgatgcagctgagaagttgaaggccgccgatggaggaggaggagaggtagacgatgaacttgaagaaggtgaaattgttgaagaatcaaatgatacggcatcgtatttagggaaagaaatcacagtgaagcatccattggagcattcatggactttttggtttgataaatctactactaaatctcgacaaactgattggggaagctcacttcgaaatctctacactttttccactgttgaagatttttggggtgcttacaataatatccatcacccaagcaagttaattatgggagcagactttcattgttttaagcacaaaattgagccacagtgggaagatcctgtatgtgccaatggagggacgtggaaaatgagtttttcgaagggtaaatctgataccagctggctgtatacgctgctggcaatgattggacatcaattcgatcatggagatgaaatttgtggagcagttgttagtgtccgggctaagggagaaaaaatagctttgtggaccaagaatgctgcaaatgaaacagctcaggttagcattggtaagcaatggaagcagtttctagattacagcgattcggttggcttcatatttcacgatgatgcaaagaggctcgacagaagtgccaagaatcgttacaccgtatag

SEQ ID NO: 659 - protein, 226 aa, Solanum habrochaites
MERTMSFDAAEKLKAADGGGGEVDDELEEGEIVEESNDTASYLGKEITVKHPLEHSWTFWFDKSTTKSRQTDWGSSLRNLYTFSTVEDFWGAYNNIHHPSKLIMGADFHCFKHKIEPQWEDPVCANGGTWKMSFSKGKSDTSWLYTLLAMIGHQFDHGDEICGAVVSVRAKGEKIALWTKNAANETAQVSIGKQWKQFLDYSDSVGFIFHDDAKRLDRSAKNRYTV

SEQ ID NO: 660 - DNA, 1049 bp, Solanum lycopersicum
atggagagaacgatgtcgtttgatgcagctgagaagttgaaggccgccgatggaggaggaggagaggtagacgatgaacttgaagaaggtgaaattgttgaagaatcaaatgatacggcatcgtatttagggaaagaaatcacagtgaagcatccattggagcattcatggactttttggtttgataaccctaccactaaatctcgacaaactgcttggggaagctcacttcgaaatgtctacactttctccactgttgaagatttttggggtgcttacaataatatccatcacccaagcaagttaattatgggagcagactttcattgttttaagcacaaaattgagccaaagtgggaagatcctgtatgtgccaatggagggacgtggaaaatgagtttttcgaagggtaaatctgataccagctggctgtatacgctgctggcaatgattggacatcaattcgatcatggagatgaaatttgtggagcagttgttagtgtccgggctaagggagaaaaaatagctttgtggaccaagaatgctgcaaatgaaacagctcaggttagcattggtaagcaatggaagcagtttctagattacagtgattcggttggcttcatatttcacgacgatgcaaagaggctcgacagaaatgccaagaatcgttacaccgtatagttcttgatgcagtgtgggattgcaagaaacacaattcgtactggaaaggttggtaggtactagtttagtttctcatttgataagcttctggtttgagtaactcgtgtgttggtgtttacactttctaatcgtggaaaattgtttgatttgaatccatgcctctatgtttcgtgaaaaaaaaaaaaaaaaaacaggaggtgctctgctagtctacaacacaagttctttggcgcgttagataatgaaactgaaaaagtaattgaatcgaagaatcgaatttactcagatatctatcgaaattattatctcatcagcacaaattaagttgtattgtgacttattcagtaaaatatataacttgttaaaag

SEQ ID NO: 661 - protein, 226 aa, Solanum lycopersicum
MERTMSFDAAEKLKAADGGGGEVDDELEEGEIVEESNDTASYLGKEITVKHPLEHSWTFWFDNPTTKSRQTAWGSSLRNVYTFSTVEDFWGAYNNIHHPSKLIMGADFHCFKHKIEPKWEDPVCANGGTWKMSFSKGKSDTSWLYTLLAMIGHQFDHGDEICGAVVSVRAKGEKIALWTKNAANETAQVSIGKQWKQFLDYSDSVGFIFHDDAKRLDRNAKNRYTV

SEQ ID NO: 662 - DNA, 1008 bp, Solanum lycopersicum
gagcggttctagggtgaaaactgtcaacaaacaaatcggagttctccctcaatataatttgaggagttcaactgaaatcaccataaccaaacccacaaatttgcgggacgaaaacaccaaaaatggctgatgaactaaacaaagctgctttagaggaatacaagtcgtcatctgtagaagacagaggtgaggaaggagagatcgtaggggaatcggatgataccgcttcgtctttagggaaacaaatcactatgaaacatccactagaacattcctggacattttggttcgataacccttcagggaaatcgaaacaagctgcttggggtagttctattcgccccatttacaccttctccactgctgaagatttttggagtgtgtacaacaacatccaccacccaagcaagttggccgtgggtgcagatttccattgttttaaaaataaaatcgagccaaagtgggaggatcctgtatgtgccaatggagggaaatggacaatgaacttttctaggggtaaatctgatacctgctggctgtatacgcttctggcactgattggagagcaattcgattatggagatgaaatttgtggagcggttatcaatgttcgagttagacaagaaaaaatagctctgtggaccaggaatgctgccaatgaaacagctcaggtgagcattggtaaacaatggaaagagtttttggattacaatgacacaattggctttatatttcatgatgatgcaaagaagcttgacagagctgccaagaatcgttattccgtgtagttctatcgttacaacagggaatgcaatcaatagagttacaggtagtatagttgttttactgaagaatcagcagtcacttacggctgcatgttttaccttttgtattggcattgccaattttcgtatagggtatttgtttggttttgaagctttttgatgacttaacgattggccatatgcatacttgtattagtaccgatgttatagaggtattttgctg

SEQ ID NO: 663 - protein, 221 aa, Solanum lycopersicum
MADELNKAALEEYKSSSVEDRGEEGEIVGESDDTASSLGKQITMKHPLEHSWTFWFDNPSGKSKQAAWGSSIRPIYTFSTAEDFWSVYNNIHHPSKLAVGADFHCFKNKIEPKWEDPVCANGGKWTMNFSRGKSDTCWLYTLLALIGEQFDYGDEICGAVINVRVRQEKIALWTRNAANETAQVSIGKQWKEFLDYNDTIGFIFHDDAKKLDRAAKNRYSV

SEQ ID NO: 664 - DNA, 849 bp, Saccharum officinarum
ctcgactcgccgcaagcccgcaaccatcccatccgccgccgccgccatggccgacgagatcgacacgaggccggcctccgcgggctcccggggccgccccgcgcacgctacggaggaggacgacagggaggagggcgagatcgccgatgacgcccccgcgcccgccctccccgccacgcacccgctcgagcactcgtggaccttctggttcgacaacccgcagggcaagagcaagcaggccgcctgggggagctccatccgacccatccacaccttctccaccgtcgaggacttctggggcctttacaataatattcatcaccctagcaagttggccatgggagctgacttccattgcttcaagaacaagattgaaccaaaatgggaagaccctatttgtgctaatggcggtaaatggaccatcagctgtggaagaggaaaatctgacacgctgtggctgcacaccctgttggctatgattggcgaacaattcgactatggtgatgaaatttgtggagcagtcgtcagcgtgcgtggcaagcaggaaagaatagctatctggacaaaaaatgctgctaatgaagctgctcagataagcattgggaagcagtggaaggaattcctggattacaaggactccattggattcattgttcatgacgatgcaaagaaggccgacaaggggaccgaggaacccttacacggtttgaaccggttgctgggaatcccagagagttaccttgcccacatgtaggggcggttcttttttgatgcagaacttgccataaccccctttgcaagagtttaaccttatggtttgaagggtttttttttttgcccaggggagtt

SEQ ID NO: 665 - protein, 235 aa, Saccharum officinarum
MADEIDTRPASAGSRGRPAHATEEDDREEGEIADDAPAPALPATHPLEHSWTFWFDNPQGKSKQAAWGSSIRPIHTFSTVEDFWGLYNNIHHPSKLAMGADFHCFKNKIEPKWEDPICANGGKWTISCGRGKSDTLWLHTLLAMIGEQFDYGDEICGAVVSVRGKQERIAIWTKNAANEAAQISIGKQWKEFLDYKDSIGFIVHDDAKKADKGTEEPLHGLNRLLGIPESYLAHM

SEQ ID NO: 666 - DNA, 785 bp, Saccharum officinarum
cagccagctgtccacctccttgtccttggactcgactcgccgcaagcccgcaaccatcccatccgccgccgccgccatggccgacgagatcgacacgaggccggcctccgcgggctcccggggccgccccgcgcacgctacggaggacgacgacagggaggagggcgagatcgccgatgacgcccccgcgcccgccctccccgccacgcacccgctcgagcactcgtggaccttctggttcgacaacccgcagggcaagagcaagcaggccgcctgggggagctccatccgacccatccacaccttctccaccgtcgaggacttctggggcctttacaataatattcatcaccctagcaagttggccatgggagctgacttccattgcttcaagaacaagattgaaccaaaatgggaagaccctatttgtgctaatggcggtaaatggaccatcagctgtggaagaggaaaatctgacacgctgtggctgcacaccctgttggctatgattggcgaacaattcgactatggtgatgaaatttgtggagcagtcgtcagcgtgcgtggcaagcaggaaagaatagctatctggacaaaaaatgctgctaatgaagctgctcagataagcattgggaagcagtggaaggaattcctggattacaaggactccattggaatcattggtcatgacgatgcaaagaaggcggacaagggaccgaggaaccgttacacggtttgatcctggtgctggaatcccagagagtaacatgcccacatgtagggtg

SEQ ID NO: 667 - protein, 220 aa, Saccharum officinarum
MADEIDTRPASAGSRGRPAHATEDDDREEGEIADDAPAPALPATHPLEHSWTFWFDNPQGKSKQAAWGSSIRPIHTFSTVEDFWGLYNNIHHPSKLAMGADFHCFKNKIEPKWEDPICANGGKWTISCGRGKSDTLWLHTLLAMIGEQFDYGDEICGAVVSVRGKQERIAIWTKNAANEAAQISIGKQWKEFLDYKDSIGIIGHDDAKKADKGPRNRYTV

SEQ ID NO: 668 - DNA, 828 bp, Solanum tuberosum
aggctgaaatccataaccaaccccacaattttcttggacgaaagcttagagaaaaacaccaaaaatggctgatgaaccaaacaaagctgcttcagaggaatacaaaacgtcatctgtagaagacggaggtgaggaaggagagatcgtaggggaatcggatgatacggcctcgtctttagggaaacaaatcactatgaaacatccactagaacattcttggacattttggttcgataacccttcagggaaatcgaaacaagctgcttggggtagttccattcgccccatttacaccttctccgctgttgaagatttttggagtgtgtacaacaacatccaccacccaagcaagttggccgtgggtgcagacttccattgttttaaaaataaaattgagccaaagtgggaggatcctgtatgtgccaatggagggaagtggacgatgaacttttctaggggtaaatctgatacctgctggctgtatacgcttctggcactgattggagagcaatttgattatggagatgaaatttgtggagcggttattaatgttcgagttagacaagaaaaaatagctctgtggaccaggaatgctgccaatgaaacagctcaggtgagcattggtaaacaatggaaagagtttctggattaccatgacacaattggctttatatttcatgatgatgcaaagaagcttgacagagctgccaagaatcgttattccgtgtagttctaccgttacaacagggaatgcaatcaatacagttacagtggtagtatacttgtttactgaagaatcagcagtcacttgtggctgcatgtttacct

SEQ ID NO: 669 - protein, 221 aa, Solanum tuberosum
MADEPNKAASEEYKTSSVEDGGEEGEIVGESDDTASSLGKQITMKHPLEHSWTFWFDNPSGKSKQAAWGSSIRPIYTFSAVEDFWSVYNNIHHPSKLAVGADFHCFKNKIEPKWEDPVCANGGKWTMNFSRGKSDTCWLYTLLALIGEQFDYGDEICGAVINVRVRQEKIALWTRNAANETAQVSIGKQWKEFLDYHDTIGFIFHDDAKKLDRAAKNRYSV

SEQ ID NO: 670 - DNA, 889 bp, Solanum tuberosum
gccacagtccacagagcagcaaaaatggcagcagctgaaatggagagaacgacgtcgtttgatgcagctgagaagttgaaggccgccgatgcaggaggaggagaggtagacgatgaacttgaagaaggtgaaattgttgaagaatcaaatgatacggcgtcgtatttagggaaagaaatcacagtgaagcatccattggagcattcatggactttttggtttgatagccctattgctaaatctcgacaaactgcttggggaagctcacttcgaaatgtctacactttctccactgttgaagatttttggggtgcttacaataatatccatcacccaagcaagttggttatgggagcagactttcattgttttaagcataaaattgagccaaagtgggaagatcctgtatgtgccaatggagggacgtggaaaatgaattttttgaagggtaaatctgataccagctggctatatacgctgctggcaatgattggacatcaattcgatcacggagatgaaatttgtggagcagtcgttagtgtccggtctaagggagaaaaaatagctttgtggaccaagaatgctgcaaatgaaacagctcaggttagcattggtaagcaatggaagcagtttctagatcacagcgattcggttggcttcatatttcacgatgatgcaaagaggctcgacagaagtgccaagaatcgttacacagtatagttcttgatgcaatgtgggaatgccaagaaaacacaattcgtactggaaaagttgggtagggcacctgggttttgttttctcaatttgattaaagccttctgggtttggagtaacctcgtgtattgggttgtgttgcactttcttaattccggccggaaacattgtttgg

SEQ ID NO: 671 - protein, 231 aa, Solanum tuberosum
MAAAEMERTTSFDAAEKLKAADAGGGEVDDELEEGEIVEESNDTASYLGKEITVKHPLEHSWTFWFDSPIAKSRQTAWGSSLRNVYTFSTVEDFWGAYNNIHHPSKLVMGADFHCFKHKIEPKWEDPVCANGGTWKMNFLKGKSDTSWLYTLLAMIGHQFDHGDEICGAVVSVRSKGEKIALWTKNAANETAQVSIGKQWKQFLDHSDSVGFIFHDDAKRLDRSAKNRYTV

SEQ ID NO: 672 - DNA, 982 bp, Triticum aestivum
gggactttccggccgccgccgcagggatggccgaggacacggagacgaggcccgcgtcggcgggcgcggaggagagggaggagggggagatcgcggacgacggagacggctcctccgccgccgctgcggggcgcatcaccgcccacccgctcgagaacgcctggaccttctggttcgacaacccgcagggcaagtccaggcaggtggcctgggggagcaccatccaccccatccacaccttctccaccgtcgaggacttctggggcctttacaacaatatccataaccctagcaagttgaatgtgggagccgacttccactgcttcaagaacaagattgagccaaaatgggaagaccccatttgtgccaatggcggtaaatggaccatcagctgtggcagagggaaatctgacacattctggttgcatactttgctggcaatgattggtgaacaatttgactttggtgatgaaatttgtggagcagtcgttagcgtgcgtcagaaacaggaaagagtagctatctggaccaaaaatgctgccaatgaagctgctcagataagcattggcaagcagtggaaggagtttctggactacaaggactccattgggttcattgttcatgaggatgcaaagaggtctgacaaaggccccaagaaccgctacaccgtttgatcccgtgactcgtcgatcctgagagcttccacagcaggcctgcctactcttggatgcaagaaggtttctcctggaatagcttagcttgtagcgggctgatgctgttttctgaaggatatattatgtgtgtttgctgtgaattgcttggaagacataatctaacatcgttgcgtttgtcgtcgtcgtactccataagtcacatcttaatttatgaagagttatattttgtgagaagcgataactcgtttgagctgcagtgtttacactactgctttgtccatcttgaacgtgagatggtttcagtgctg

SEQ ID NO: 673 - protein, 215 aa, Triticum aestivum
MAEDTETRPASAGAEEREEGEIADDGDGSSAAAAGRITAHPLENAWTFWFDNPQGKSRQVAWGSTIHPIHTFSTVEDFWGLYNNIHNPSKLNVGADFHCFKNKIEPKWEDPICANGGKWTISCGRGKSDTFWLHTLLAMIGEQFDFGDEICGAVVSVRQKQERVAIWTKNAANEAAQISIGKQWKEFLDYKDSIGFIVHEDAKRSDKGPKNRYTV

SEQ ID NO: 674 - DNA, 923 bp, Taraxacum officinale
agagaaacataattcgagagaaagatggtggaagaagtaatgaaatcggaggagcagaagtcaatcgatgtcaacaagcacaggggagttcgatcagacggagaagaagatgagcaactcgaagagggagagattgtcggtgcggacgtggataccctatcgtcttcatcttcttccagacctggtaccgccatagcacagcatccgctcgagcattcttggacgttctggttcgatactccctctgccaaggccaagcaaatcacttggggtagttccatgcgccctatctacactttttccaccgttgaagagttctggagtatttacaacaatatgcatcgaccaagcaagttggggcagggatacgactactattgcttcaaaaacaaaatcgagcctaaatgggaagaccctgtttgtgccactggtggaaaatggaccatgacctttaccaaagcaaaatttgacaatggttggctgtatacgttgcttgcaatgattggagaacaatttgaacatggagatgatatatgtggagcagttgtaaatgttagaaaacaagataaaatagctttgtggaccaaaaatgctgccaatgaaagagctcagctaagcattgggaaacagtggaaggagtttaatgattacaatgataacataggctttatatttcatgaagatgcgatgaatcttgacagaaatgctaaaaacaaatacacagtatgaggtgttcctatgttttcctagtgcctaaaaatgcaatttcttttgtatggttgaatgtacttttgactttttatgtgttaccgatttatctggcaagaactttatcatgtcttagtgttagtttttggatattatgatattaaaagaaacaaaattgcagtgatgaggaatttgacatctgacagttggaaatg

SEQ ID NO: 675 - protein, 234 aa, Taraxacum officinale
MVEEVMKSEEQKSIDVNKHRGVRSDGEEDEQLEEGEIVGADVDTLSSSSSSRPGTAIAQHPLEHSWTFWFDTPSAKAKQITWGSSMRPIYTFSTVEEFWSIYNNMHRPSKLGQGYDYYCFKNKIEPKWEDPVCATGGKWTMTFTKAKFDNGWLYTLLAMIGEQFEHGDDICGAVVNVRKQDKIALWTKNAANERAQLSIGKQWKEFNDYNDNIGFIFHEDAMNLDRNAKNKYTV

SEQ ID NO: 676 - DNA, 1209 bp, Vitis vinifera
aatacagagaaaatacagagagcgagacagcgttggaaaataaaccaaagaaagccaagatagtgaaggaaaaaatgggagatacggttgtagaggagctaccgaggtctgccaccacggaggatcagggttccacccacaaccctaaccctaggcctcatggcgacgatgaagaggacctcgaggagggagagatcgttgtcgatgacgcctcggcgtcactgaagcagtcggcggcgataacccatcaacctcacccgctggagcattcgtggactttctggtttgacaaccccagcgctaaatcgaagcaagccgcatggggcagttcgatgcgcccgatctacactttctctaacgttgaagagttctggagcatttacaacaatatacatcatccgagcaagttagctgtcggagcagacttccattgtttcaaacacaaaattgagccaaaatgggaggaccctgtttgtgctaatggggggaagtggactgtaacctttgctaaagggaaatctgatacctgttggctttatacgttgctagccatgatcggagaacagtttgatcatggagatgaaatctgtggagcagtgatcaatgtcagagctagacaggagaaaatagctctatggaccaagaatgcttcaaatgaagctgctcagctgagcattggaaaacaatggaaggaatttctggattacagcgaaagcataggcttcatatttcatgaggatgcaaagaagcttgacagagctgccaagaatcgatacacgatatgaggctgtacagaattgtgtctgtggagggacaccaaatgattcaagacgtcaaccaacatgttaagaagttacaatacatagttgagaattcagaactgagttttagccgtcttcttgtcctgtttgcttctgtttaggccttgttatagaaagcagtcttaaaccatcttaatttttctcttcaaattctcatttcgttctcctccatcccccatttaaattttatatgtaccaatatatacttggtagaagttgtcacgcttcaatcattttaatctccatttagagttaggaagcgcttttactttaaaaagcgtttttgataaaataaaaaaataaaaataaaaaaatgtatttggtgatgttaattgcttcccgaacttacgggaaaccaaattcatataatgcagtggatttgatggca

SEQ ID NO: 677 - protein, 236 aa, Vitis vinifera
MGDTVVEELPRSATTEDQGSTHNPNPRPHGDDEEDLEEGEIVVDDASASLKQSAAITHQPHPLEHSWTFWFDNPSAKSKQAAWGSSMRPIYTFSNVEEFWSIYNNIHHPSKLAVGADFHCFKHKIEPKWEDPVCANGGKWTVTFAKGKSDTCWLYTLLAMIGEQFDHGDEICGAVINVRARQEKIALWTKNASNEAAQLSIGKQWKEFLDYSESIGFIFHEDAKKLDRAAKNRYTI

SEQ ID NO: 678 - DNA, 1014 bp, Zantedeschia aethiopica
accagcaggtactccacatcgtcgccggatccatcccttctcggccgccccatcaggaggaggaggaggagccatggcggacgagacggcagtgtcggaggccggcggcaaggcagaggagagggaggagggggagctggaggaaggggagatctcgtccgacgaggcggcgccgccgaggtctgtggcgcagcaccaaccgcacccgctggagcactcgtggacgttctggttcgacaaccccgccgccaaggccaagcaggccacctggggcagctccctccgccccctccacaccttctccaccgcggaggacttctggggcctttacaacaatatacaccatccaagcaagttagtcacaggagctgactttcattgtttcaaacacaaaattgagccaaagtgggaggaccctgtttgtgctaatggaggaaaatgggccataagttgctccagagggaaagttgatacatggtggttgtacaccctattagctatgatcggtgagcagtttgactatggtgatgaaatttgtggagcggttgttaatgtacgtgcaaaacaggtgaaaatatctatatggacaaaaaatgcttccaatcaagaggcccagatcagtattgggaaacagtggaaggagttcttggattataatgaaacgattggatttatatttcatgatgaagcaaagaagctcgacagagctgccaaagatcgttatcaagtgtaatcttgaagcggctcgacattggaggaagcagagaagcttgagatcagcaggacgaagccttcagtacccggtagagattgcccctctgatggtcgatagtatttggcatcaagtttctcttttgtttatattgggtattgctggaaggcagattctggattgctgctctttcccccattcgtgttttgctggaatgtaatctgccactttgctctgtttgatgtaacttatttttgtttcatcctttagagacccccttattagagttccatttccttggg

SEQ ID NO: 679 - protein, 219 aa, Zantedeschia aethiopica
MADETAVSEAGGKAEEREEGELEEGEISSDEAAPPRSVAQHQPHPLEHSWTFWFDNPAAKAKQATWGSSLRPLHTFSTAEDFWGLYNNIHHPSKLVTGADFHCFKHKIEPKWEDPVCANGGKWAISCSRGKVDTWWLYTLLAMIGEQFDYGDEICGAVVNVRAKQVKISIWTKNASNQEAQISIGKQWKEFLDYNETIGFIFHDEAKKLDRAAKDRYQV

SEQ ID NO: 680 - DNA, 1160 bp, Zea mays
gggaaaggaaacctagacaagcgaggcggcggccccgcgttctccgtctccgtctccgtctccgtccgcccggcgtaaagaaaagcctctctcaccacagccgccacgccatggccgaggagaccgacaccaggcctgcctccgcgggctcccgaggccgccccgcgcccgaggacgacgacagggaggagggcgagatcaccgacctcgcctgcgctccttccccgcccgccacgcacccgctcgagcactcctggaccttctggttcgacaacccgcagagcaagtccaagcaggccgcctgggggagctccatccgccccatacacaccttctccaccgtcgaggaattctgggggctttacaataacattaatcaccctagcaaattgatcgtgggagctgatttccattgcttcaagaacaagatcgagccaaaatgggaagaccctatttgtgcgaatggtggtaaatggaccatcagctgtggaagaggaaaatctgatacattttggctgcacactctgctggctatgattggtgaacaattcgactatggtgatgaaatttgtggcgcagttgtcagtgtgcgtgggaagcaggaaagaattgctatttggacaaaaaatgctgccaatgaagccgctcaggtaagcatcgggaagcagtggaaggaacttctggactacaaggactccattggattcattgttcatgacgatgcaaagaagatggacaaaggcctgaagaaccgttacacggtttgatcctgatgctggaatcccagagagttgtagcagtagctggcccaaatgcatgctgggtggttttatctattgctgatgagttgtttaagcaagatccattcctgtattgtactccataagccacttgggtgttgctttgtattgttcactgctgtgttttttctgtggcaccgcatctacagtactagttgcttgtcgttgttcagttgcgcttgaatctgaactaacggagtctgagcaaaacacagcatattcaaacacggcgagcagcaccgtagccaaggcgacaggaactcaggaagtgcggtgaattagatttgttagatataatcaagttgaatttgtatttagactctgatgggcctgtttgtttcagattatataattaggctt

SEQ ID NO: 681 - protein, 218 aa, Zea mays
MAEETDTRPASAGSRGRPAPEDDDREEGEITDLACAPSPPATHPLEHSWTFWFDNPQSKSKQAAWGSSIRPIHTFSTVEEFWGLYNNINHPSKLIVGADFHCFKNKIEPKWEDPICANGGKWTISCGRGKSDTFWLHTLLAMIGEQFDYGDEICGAVVSVRGKQERIAIWTKNAANEAAQVSIGKQWKELLDYKDSIGFIVHDDAKKMDKGLKNRYTV

SEQ ID NO: 682 - DNA, 890 bp, Zea mays
cctccttggacacgactcgccgcacccatccccatccgccgccgctgccatggccgacgagattgacacgaggccggcctccgcgggctcccgcggccgtcctgcgcacgctaccgaggacgacgaccgggaggagggcgagatcgccgccgacgccccctcgcccgccctccccgccgcgcacccgctcgagcactcgtggaccttctggttcgacaacccgcacggcaagaacaagatggccgcctgggggagctccatccgacccatccacaccttctccaccgtagaggacttctggggcctctacaataatatccatcaccctagcaagttgatcggtggagctgacttccattgcttcaagaacaagattgagccaaaatgggaagaccctatttgtgctaatggcggtaaatggaccatcagctgtggaagaggaaaatctgacacgctgtggctgcacaccctgttggctatgatcggcgaacaattcgactatggtgatgaaatttgtggagcagtagtcagcgtgcgtagcaagcaggaaagaatagctatctggacaaaaaatgctgctaatgaagctgctcagataagcatcgggaagcagtggaaggaatttctggattacaaggactccattggattcattgttcatgacgatgcaaagaagatggacaagggactgaagaaccgttacacggtttgatcccagagagtagtagcatgtagggtggttctttccgattccgtagcaccttgcagagtgtgttgaaggttctctatttgctgaggagttgcttaagcataatctaacatgatgtcgaatgtattcctgtatgttccataggtcagtcacctaggtgcctaggtgttgtttttgtttc

SEQ ID NO: 683 - protein, 220 aa, Zea mays
MADEIDTRPASAGSRGRPAHATEDDDREEGEIAADAPSPALPAAHPLEHSWTFWFDNPHGKNKMAAWGSSIRPIHTFSTVEDFWGLYNNIHHPSKLIGGADFHCFKNKIEPKWEDPICANGGKWTISCGRGKSDTLWLHTLLAMIGEQFDYGDEICGAVVSVRSKQERIAIWTKNAANEAAQISIGKQWKEFLDYKDSIGFIVHDDAKKMDKGLKNRYTV

SEQ ID NO: 684 - DNA, 870 bp, Zingiber officinale
aggggagatcaagggatgatgccgcgaaccctgaaggctgttgctgtgagggtgggagccgagcagccccaccccctggagcactcttggcctttctggttcgacaacccccaatccaagtcgaagcacgctgtctggggcagttccctcggcgggatccataccttttccactgtcgaagatttctggggcttatacaataatatcaatcatccaagcaaactgataacgggagctgattttcattgctttaaggacaacattgaaccaaaatgggaagacccagtttgtgctaatggagggaaatggactattagttgtgctagaggaagatcagatcagatgtggttatatactttattggcaatgatcggggagcagtttgactatggggatgaaatttgtggagcagttgttaatgtaagagggaaacaagaaaagatagctttgtggaccaagaatgctgctaatgaaaaagctcagatgagcatcgggaagcaatggaaagaatttctggactataatgacactattaactttctagttcatgacgatgcaaagaagctggagaagcttgctaagaatcgttatacggtgtgatttctgtcaccctatataacttttgtctcataaaccataccagttacaaccttcaacctgtgtgaagtactgcgatgtttcctatcaatctctaatacagataccatatgaactttttgctgtttgattgcacttttctaaaaaaaagcaaaatccatgtgtttttgtttttgtttttttcttcatacactttgttcttacaacaagtgcataaatttatgctttgttgataccctctgtgatataacgtatcaatgtgtgagaaaaatc

SEQ ID NO: 685 - protein, 194 aa, Zingiber officinale
MMPRTLKAVAVRVGAEQPHPLEHSWPFWFDNPQSKSKHAVWGSSLGGIHTFSTVEDFWGLYNNINHPSKLITGADFHCFKDNIEPKWEDPVCANGGKWTISCARGRSDQMWLYTLLAMIGEQFDYGDEICGAVVNVRGKQEKIALWTKNAANEKAQMSIGKQWKEFLDYNDTINFLVHDDAKKLEKLAKNRYTV

SEQ ID NO: 686 - DNA, 1050 bp, Cryptomeria japonica
cgaattttgcagcctggccgaagggaataaacaaaacacgaggcattttttcggtaaagaagtcatcgaggcattttttcgaaccaccgggaagggaggataatggaggatgcggcagagataggtgaagcaggtgcagaggaaggagaaatcgtggaaggaggagagaatattgaaaggtcgctggaggcagcggactctaacacacatccactcgagcattcatggacattctggttcgataatccaaatggcaagtcaaagcaggctgcgtggggttcttccttacgctctgtttacacgttcagcactgtcgaggatttctggcgcctctataacaatatagttcagccaactaagttgatggctggttcagattttcattgtttcaaagatggaattgagccgaagtgggaggatcctaaatgtgcaaatggaggaaagtggacagttaacaacagtaaaggaaagcaagcacttgatactctgtggctcaacactttgttggcaatgattggtgaacagtttgatgaaggtgatgaaatttgtggggcagttgtgaatgtgcgtaataaacaagacaagatagcactctggactaagaatgctgcaaatgagtccgcccagatgagcattgggaagcaattgaaagagttccttgattacaatgaaaaaatgggatatatgttccatgatgatgccaagaaggacagagcggccaaaaatagatataatatattataggacattgtcattgggtagcatggatatacttaaaatttacaggttacaagcagcattttaatgcatgtatcatgttttgaaaggccatatattatatcttaataaacagggtttcatgttcaattttgtccttattaagtaaattacccacattattaaacatagtttcatgagttggttttgtgccgcctcaacaaattgtaagcaaaataaatggattatgaacattatgagacttatgtttctttttaacatgtacacacttaaaagagacttgaagctagtttattttgaatgtgaactatt

SEQ ID NO: 687 - protein, 213 aa, Cryptomeria japonica
MEDAAEIGEAGAEEGEIVEGGENIERSLEAADSNTHPLEHSWTFWFDNPNGKSKQAAWGSSLRSVYTFSTVEDFWRLYNNIVQPTKLMAGSDFHCFKDGIEPKWEDPKCANGGKWTVNNSKGKQALDTLWLNTLLAMIGEQFDEGDEICGAVVNVRNKQDKIALWTKNAANESAQMSIGKQLKEFLDYNEKMGYMFHDDAKKDRAAKNRYNIL

SEQ ID NO: 688 - DNA, 958 bp, Marchantia polymorpha
cagatgtggagaaaccgtctccagttgccgaaccagcagcgagcgtggatatggagaagcaagaactcgaagaaggagaaatcgtgagcacggagccgacgactcccgccccagagcattctctggagaacaagcacccgttggagcatgggtggacgttttggttcgataatcccaatggaaaatcgaagcaggcgacgtgggggagctctctgcgacccgtttacacattcaagaccgtcgaggacttttggtgcttgtacaacaatgttcttcaaccgagtcatttgatcgccggagccgacttccattgcttcaaggatggaattgagcctaaatgggaggacccaaggtgtgcacaaggaggaaaatggagcacgagtactccgaggggcaacaacaacaaggctacccttgaccaattttggctacacacgcttctagccatgatcggtgaacagtttgatgagtacgatgaagtttgtggcgctgtcgtgagcgtgcgaactcgccaggacaagattgccttgtggacgaaaactgcctctaatgaagcagctcagacgagtatcggaaagcagtggaagtccgtactggacatcagcgacaagataggttaccttgtccatgaggatgctaggaggttggacaaaggtgctaagaacaagtacacggtgtaagagattgtttcatgtagtcaacgtatagattatcctgaccacttttaacaattatatactacgtttccacaattaaactttagtcttatgttagaaactttttactacgatggccttgtttgtctatctgggttcaaacagttcaaaagctgttacagttttgctgtgtttgtagagaggtgtccaagcaactggcacttgggagttcaaaagatggtttgcagaggattatttttgtactgaataaacagctcaatttaacaaagtgaagtagcacc

SEQ ID NO: 689 - protein, 209 aa, Marchantia polymorpha
MEKQELEEGEIVSTEPTTPAPEHSLENKHPLEHGWTFWFDNPNGKSKQATWGSSLRPVYTFKTVEDFWCLYNNVLQPSHLIAGADFHCFKDGIEPKWEDPRCAQGGKWSTSTPRGNNNKATLDQFWLHTLLAMIGEQFDEYDEVCGAVVSVRTRQDKIALWTKTASNEAAQTSIGKQWKSVLDISDKIGYLVHEDARRLDKGAKNKYTV

SEQ ID NO: 690 - DNA, 558 bp, Ostreococcus lucimarinus
atgacgaagcaccccctcgaacacacgtggactttgtggtttgataatccaaacggtcgccagaagcagaccacatggggacaaacacttcggagtgtatatactttcaacactgtggaagacttttggtgtctgtacaacaacatccttacaccttccaaattaatcatgggtacggattttcatttgttcaaggagggcatcgagccaaagtgggaagatgagacatgcgcaaaaggtggcaaatggacatattatgtcccaaagcagaaagatggggaagagcttgacgaaagttggttgaatcttcttttgtgtatgattggcgagcaattcagtgaaaccaccgaagtttgcggagccgtcatcagtgtgcggcagaagcagcatcgaatcgccttgtggacaaagacagcgtcaagcgaacctgaacaggtagctattggtcgacatttgaaagacattttggacatccctgaaagtgagaaaatcgggtacatggtacacgatgatgccattcgactggagcgtagggcaaaggatcggtacaccgtttga

SEQ ID NO: 691 - protein, 185 aa, Ostreococcus lucimarinus
MTKHPLEHTWTLWFDNPNGRQKQTTWGQTLRSVYTFNTVEDFWCLYNNILTPSKLIMGTDFHLFKEGIEPKWEDETCAKGGKWTYYVPKQKDGEELDESWLNLLLCMIGEQFSETTEVCGAVISVRQKQHRIALWTKTASSEPEQVAIGRHLKDILDIPESEKIGYMVHDDAIRLERRAKDRYTV

SEQ ID NO: 692 - DNA, 591 bp, Ostreococcus taurii
ccgaaagcacgagcgagggtttcagacaaataaataatgaagcacgctcttgagaacacgtggacactatggttcgataatccaaacgggcgccagaagcagacgacttggggacagacactccgcagtgtgtacacgttcaacacggtagaagatttctggtgtctgtacaataacatactgacgccttcaaaattgataatgggaacggatttccatcttttcaaagaagggattcagccgaagtgggaggatgagacgtgcgcgaaagggggtaagtggacatattacgttccgaaacagaaggatgggggcgagcttgatgagtgctggttgaatctactcctgtgtatgattggagaacagttcagcgaatcgacggaaatctgtggagctgttgtcagcgttcgacaaaagcaacaccgtattgctctttggacgaaaacagcgtcaagtgaacctgagcaaactgcgattgggcgacattttaaagacatcttggaggtgcccgagagcgaaaaaattggctacatggtacatgacgatgcgattcgccttgaccgccgcgctaaagatcgatacactgtgtga

SEQ ID NO: 693 - protein, 184 aa, Ostreococcus taurii
MKHALENTWTLWFDNPNGRQKQTTWGQTLRSVYTFNTVEDFWCLYNNILTPSKLIMGTDFHLFKEGIQPKWEDETCAKGGKWTYYVPKQKDGGELDECWLNLLLCMIGEQFSESTEICGAVVSVRQKQHRIALWTKTASSEPEQTAIGRHFKDILEVPESEKIGYMVHDDAIRLDRRAKDRYTV

SEQ ID NO: 694 - DNA, 1091 bp, Picea glauca
  misc_feature (1082)..(1083): n is a, c, g, or t
gctagggcttattttcaagcgaggagaggagaatggcgcaggaagaaccacagaacggtgaagttaaactgatagagaggcccatcgatggcgggaagaagcacccattggagaatgcgtggactttctggttcgacaacccctccgggaaatccaagtcggcagcatggggcagttcccttcgttccgtctacaccttcaagacggttgaagatttctggtgtttatacaacaacgtgtttttgccgagcaagctgccctcgggggcagattttcactgctttaaagcggggatagaacctaagtgggaggatcttatatgcgcccatggaggaaagtggactgccactaacacccgaggcggcaaggctggattggatcaactatggcttaacactttgttggccatgatcggtgaacaatttgacgaaggcgatgagatttgtggtgctgtggcaagtgtaagagctagacaagaaaagattgccttgtggaccaggaccgccaccaatgaagctgcccagatgtcaattggtaagcagtggaaagagttcatcgactataacgaaaagattcagtacatgttccatgaagatgcaaagaaggataaagctgcaagaaatagatatacattataaagttgaatctccaagtttctattttgccttcccacctgtgagaaaccatatatgcactgggaaatgaatggttcatcacctaagtgtgttgatacattcttataagaaagataaaggcaggtatagtgtgttcgttatcatcaactatgtccaagatccaatgttgtctggtaaatgtgtactttcatggaagatacgtttgtttagtatctgtttgcccctttgaatattattactatcatagtacctgttgtaatttgttacttagcttccttcaagatttcaaatatgtctagcaaccatgaggatatgaggacactattataagagttaagttgcacttggaaaatattaatatggtggcgactgatagctgtagcaaaagtactttttttttgcagcgagagaagttaatgagttttattactagagacaggaataaannccacaatt

SEQ ID NO: 695 - protein, 201 aa, Picea glauca
MAQEEPQNGEVKLIERPIDGGKKHPLENAWTFWFDNPSGKSKSAAWGSSLRSVYTFKTVEDFWCLYNNVFLPSKLPSGADFHCFKAGIEPKWEDLICAHGGKWTATNTRGGKAGLDQLWLNTLLAMIGEQFDEGDEICGAVASVRARQEKIALWTRTATNEAAQMSIGKQWKEFIDYNEKIQYMFHEDAKKDKAARNRYTL

SEQ ID NO: 696 - DNA, 998 bp, Pseudotsuga menziesii
ggtgaagttaagatgatagagaggcccatcgacggcggcaagaagcacccattggagaatgcatggactttctggttcgacaatccctctggaaaatccaagtcggcagcatggggtagctctcttcgttcggtgtacaccttcaagacggtcgaagatttctggtgtttatacaacaacgtctttttgccgagcaagctgccctccggggcagatttccactgctttaaagcggggatagagcccaagtgggaggaccttacatgtgcccatggaggaaagtggactgccactaacacccggggcggcaaggctggattggatcaactatggcttaatactctgttggccatgatcggtgaacaatttgacgaaggtgatgagatttgtggtgctgtggcaagtgtgagagctagacaagaaaagattgccgtgtggaccaggactgccaccaatgaagctgcccagatgactattggtaggcagtggaaagagttcatcgactataatgaaaagattcattacatgttccatgaagatgcaaaggataaagctgcaagaagtagatatatattataaattaaatcttgaagtttctattttgtcttcccacctgtgagaaaccatatatgcaatgggaaatcaacactgactgaagtgtgttgatatattcttagaagaaagataaaggcaactatagtgtgttatttatcgtcaactatgatcatgatccaatgctgtttgggaaaagtgtactttcacggaagacacgtttgtttagtatctgtttgcccctttgaatattactatcattgtacctgttgtaatttgttaccttgcttcctttaagattttaattatatgtagcaaccatgaggatacgaggacaccattataagagttgcattggaaaatattaatacagtggggactgtgatatctgtagcaaaagtacatttatttttgcagtgagataagttagtgagttttattactac

SEQ ID NO: 697 - protein, 188 aa, Pseudotsuga menziesii
MIERPIDGGKKHPLENAWTFWFDNPSGKSKSAAWGSSLRSVYTFKTVEDFWCLYNNVFLPSKLPSGADFHCFKAGIEPKWEDLTCAHGGKWTATNTRGGKAGLDQLWLNTLLAMIGEQFDEGDEICGAVASVRARQEKIAVWTRTATNEAAQMTIGRQWKEFIDYNEKIHYMFHEDAKDKAARSRYIL

SEQ ID NO: 698 - DNA, 1009 bp, Physcomitrella patens
agtcttttacaaagttgtgtgcgattccggcactcatccaccgcaggcgttgcgttgaatcgagtctgcgtgttaccgtaggttgcaagtttgtgacggattcaggtgtggttaagaatcaagggagaagcgcaggtgtagcaatggcggacgagttggcagcggcgaccgaagctttgagattggatgattccaagggcgaggagctggaggagggggagattgttgagaaccccgcagatcgtcccgccgagacgaagaagcacccgctggagcattcgtggacgttttggtttgacaatccgaacgggaaacagaagcaggccacatgggggagctctctgcgttccgtctacacgtttcacactgttgaggaattttggtgcttgtacaacaacattttgcaacctagcaagctgattgctggggcagattttcactgcttcaagagcggaattgagcctaaatgggaggaccctaagtgtgcccatggtggcaaatggactgctcagccacccaggagcggcggcaaggctgtgcttgacacctactggcttcacacattgctggctatgattggagagcaatttgatgaaggtgacgaaatttgtggagcagttgtcagcgtgagacgagcgcaggacaaaatagctatctggactaagactgcctctaatgaggctgctcaggtcagcatcgcgaagcaatggaaagatgttctggattacaatgacaagattggttacctagttcatgaggatgccaaaagacaagacaagaacgctaaaaacaggtatactgtttagaaaatagggtccattggatcatataacttgttttaaggactgccatcttatccatggtagcgtcacctctctggttagtgacgtgctctctagccatgtggctatcctgtttttagacagtagataacggcagagtttcttacaagctttggatgcttttgttattcttgtccctggagaatgtataattatcttcagtaatt

SEQ ID NO: 699 - protein, 220 aa, Physcomitrella patens
MADELAAATEALRLDDSKGEELEEGEIVENPADRPAETKKHPLEHSWTFWFDNPNGKQKQATWGSSLRSVYTFHTVEEFWCLYNNILQPSKLIAGADFHCFKSGIEPKWEDPKCAHGGKWTAQPPRSGGKAVLDTYWLHTLLAMIGEQFDEGDEICGAVVSVRRAQDKIAIWTKTASNEAAQVSIAKQWKDVLDYNDKIGYLVHEDAKRQDKNAKNRYTV

SEQ ID NO: 700 - DNA, 1076 bp, Physcomitrella patens
ggagatctgctaatttgatgctgcgcgatcaattgactcttccttgaccgtggacacacattggaccaactttcggtccttctcgcagcagagggcaaattcagagagcagcggtgagggaagtacagtgtgggagttcaactgggtacagccatggcagacgagttggcagaaacgacgaagtcgttgagattggacgatcccaaggctgacgacttggaggaggtagagattgcggagaagcccgtagatgaggcacctagggcgaaaaagcacccgttggagcattcatggacgttttggttcgataacccgaatgggaagcagaagcaggcgacatggggtagctctctccgtgccgtgtatacgttcgataccgtcgaagatttttggtgtttttataataacgttttgcaacctagcaaactaaatgcgggtgcagattttcactgcttcaaggcaggaattgagcctaagtgggaggatcccaagtgcgctcatggtgggaaatggactgctcagcctcccaggagtggcggcaaggctgccctggatacttactggctacacactttgctcgcaatgatcggagagcaatttgacgaaagcgaagaaatttgtggagcagttgtaagcgtcagaagggctcaagataagattgctatctggactaagactgcatccaacgaggccgctcaggttactattgggaaacaatggaaggatattattgactgcaatgacaagctgggctaccttgttcatgaggacgctaaaagacaagaaaagggtgccaaaaacagatacactgtttagaaaatagagtttcttagaatgtatcccttatgttaggactgccagcttaattttggtttggttgcttttggtcgcctgtggtggatttctggtttttagacagagttacaagttgcaatggcactgacttttgacatttctgttgtttttgttggtgaagaatgcaaaattgctttagcaatttgaggctgtaaattagagcggggctctattatgttattgagaattttcatcctgacggtatatgctgtcacagcttc

SEQ ID NO: 701 - protein, 220 aa, Physcomitrella patens
MADELAETTKSLRLDDPKADDLEEVEIAEKPVDEAPRAKKHPLEHSWTFWFDNPNGKQKQATWGSSLRAVYTFDTVEDFWCFYNNVLQPSKLNAGADFHCFKAGIEPKWEDPKCAHGGKWTAQPPRSGGKAALDTYWLHTLLAMIGEQFDESEEICGAVVSVRRAQDKIAIWTKTASNEAAQVTIGKQWKDIIDCNDKLGYLVHEDAKRQEKGAKNRYTV

SEQ ID NO: 702 - DNA, 1251 bp, Physcomitrella patens
cgctttgctcccatctgcggagctttgggctcatttttgcaggtcttcgaatcgcttctgactttgcagcccttgaatcgactactcggtctcttttctgtagcggagagcaatccacaccgcaaccttggcaaggaatttgagcgggagagagagagaaagagagagatatagagaggtcaataccatattgaaatggcggacgagttggcagtgacgacggaggcactgaccttggacgattccaaggccgatcaggtagaagtaggggagattgttgagaagcccgtagatcggccagctgaggtgaagaagcacccattggagcattcgtggacattttggttcgataacccgggcgggaagcaaaagcaggcaacatgggggagctctcttcgtgccgtgtatacgttccacactgtcgaagagttttggtgcttgtacaacaacgttttgcaacctagcaagctgattcagggtgcggattttcattgcttcaagtccggaattgagccaaagtgggaggatcccaagtgtgctcatggtggcaaatggactgcgcagcctcctagaagcggcggcaaggctatccttgatacctactggcttcacactttgctggctatgattggagagcaatttgacgaaggtgatgaaatttgcggagctgttgtgagcgtaaggagggcacaagataagattgccatctggacgaagactgcttccaacgaggccgctcaggttagcattgcaaagcaatggaaggaggttcttgactataatgacaagctcggctaccttgtccatgaggacgcaaagagacaagacaagagtgcgaagaacagatataccgtctagaaaatagtgtgtgttagcataaatgacatgtgttaggactgccagttttacataggttgggccacgttggtcagtgacgtgttcagtacctgcgatggctatccggtttttagacagtagagaacgctagagttttaggttaactggcacagtcttgtatcgcttcagttatgtaggttagtgaagagcgtgaaattacttcggttatccaaggctgtagattagagctaggacagtacagtcttaatggtgtactcggattgttgtgaaactccctgttactgacattttctgtcacaacgtccgcttgggatgccggctgagcggtatacgcgttctatttctcaagcgtttagccgttgaggaggtttgcatgtgatcaagagcttgaat

SEQ ID NO: 703 - protein, 220 aa, Physcomitrella patens
MADELAVTTEALTLDDSKADQVEVGEIVEKPVDRPAEVKKHPLEHSWTFWFDNPGGKQKQATWGSSLRAVYTFHTVEEFWCLYNNVLQPSKLIQGADFHCFKSGIEPKWEDPKCAHGGKWTAQPPRSGGKAILDTYWLHTLLAMIGEQFDEGDEICGAVVSVRRAQDKIAIWTKTASNEAAQVSIAKQWKEVLDYNDKLGYLVHEDAKRQDKSAKNRYTV

SEQ ID NO: 704 - DNA, 546 bp, Physcomitrella patens
atgcacttgttgcaacattcatggacgttctggttcgacaatcccaatggaaaacagaagcaggcgacgtggggaacctccctccgtgaggtgtacactttctatactgtggaacaattttggggtttgtacaacaatgtgttgccgcctagcaagatgtctgccaatgcagattttcattgcttcaagactggaatccagcccaagtgggaggacccgaaatgcgctcatggtggcaaatggactgttcagcttccaagaagcggcggcaagatgcttctcgacacctactggctttataccctgctggcgatgattggagaacaattcgatgaaggcgatgaaatttgcggagcagtggttagtgctcggagggcccaagataagatcgccatctggaccacaaccgcttccaacgagaatgctcagataagcattggtacgcaatggaaggatgtactggactatcacgaaaaacttggatatgtctttcacgatgatgctaagagacaagagaagaacgcaaaaagcaggtatacggtgtga

SEQ ID NO: 705 - protein, 181 aa, Physcomitrella patens
MHLLQHSWTFWFDNPNGKQKQATWGTSLREVYTFYTVEQFWGLYNNVLPPSKMSANADFHCFKTGIQPKWEDPKCAHGGKWTVQLPRSGGKMLLDTYWLYTLLAMIGEQFDEGDEICGAVVSARRAQDKIAIWTTTASNENAQISIGTQWKDVLDYHEKLGYVFHDDAKRQEKNAKSRYTV

SEQ ID NO: 706 - DNA, 888 bp, Pinus pinaster
aattcggcacgaggactactatggctttatttcaagggtgcgacaagaatggcgcaggaagaaccccagaacggtgaaactactctgatagagaggcctattgatggcgggaagaagcatgtattggagaactcatggactttctggttcgacaacccttccgggaaatcgaagtcggcagcatggggcagctcacttcgttccgtctataccttcaggacggttgaagatttctggtgtttatacaacaacgtgtttctgccaagcaagctgcccgcaggggcagatttccactgctttaaagcgggtatagagcccaagtgggaagaccttacatgtgctcacggaggaaagtggactgccactaacacccgaggcggcaaggctggattggatcaactatggcttaacactctgttggccatgatcggtgaacaatttgacgaaggcgatgaaatttgtggtgctgtggctagtatgagagctagacaagaaaaaattgccttgtggaccagaactgccaccaatgaagctgcccagatgtcaattggtaagcagtggaaagagttcctcgactataacgaaaagatccattacatgttccatgaagatgcaaagaaggataaatctgcaagaaatagatatacaatataaagttaaattttgaagtatctattttgcctttgcacctgtgagaaaccatatatgcactgggaaatggttcggcactgactggagtgtgttgatacattcttataagaaagataaaggcagctatagtgtgttagttattgtcaactgtccatgatccaacgttgtctgcgaaaagtgtatttttatggaagacacgtttatctagtatctgttttccctttttaatattaaaaa

SEQ ID NO: 707 - protein, 201 aa, Pinus pinaster
MAQEEPQNGETTLIERPIDGGKKHVLENSWTFWFDNPSGKSKSAAWGSSLRSVYTFRTVEDFWCLYNNVFLPSKLPAGADFHCFKAGIEPKWEDLTCAHGGKWTATNTRGGKAGLDQLWLNTLLAMIGEQFDEGDEICGAVASMRARQEKIALWTRTATNEAAQMSIGKQWKEFLDYNEKIHYMFHEDAKKDKSARNRYTI

SEQ ID NO: 708 - DNA, 1100 bp, Picea sitchensis
gattagtaatactactagggcttattttcaagcgaggagaggagaatggcgcaggaagaaccacagaacggtgaagttaaactgatagagaggcccatcgatggcgggaagaagcacccattggagaatgcgtggactttctggttcgacaacccctccgggaaatccaagtcggcagcatggggcagttcccttcgttccgtctacaccttcaagacggttgaagatttctggtgtttatacaacaacgtgtttttgccgagcaagctgccctcgggggcagattttcactgctttaaatcggggatagaacctaagtgggaggatcttatatgcgcccatggaggaaagtggactgccactaacacccgaggcggcaaggctggattggatcaactatggcttaacactttgttggccatgatcggtgaacaatttgacgaaggcgatgagatttgtggtgctgtggcaagtgtaagagctagacaagaaaagattgccttgtggaccaggaccgccaccaatgaagctgcccagatgtcaattggtaagcagtggaaagagttcatcgactataacgaaaagattcagtacatgttccatgaagatgcaaagaaggataaagctgcaagaaatagatatacattataaagttgaatctccaagtttctattttgccttcccacctgtgagaaaccatatatgcactgggaaatgaatggttcatcacctaagtgtgttgatacattcttataagaaagataaaggcaggtatagtgtgttcgttatcatcaactatgtccaagatccaatgttgtctggtaaatgtgtactttcatggaagatacgtttgtttagtatctgtttgcccctttgaatattattactatcatagtacctgttgtaatttgttacttagcttccttcaagatttcaaatatgtctagcaaccatgaggatatgaggacactattataagagttaagttgcacttggaaaatattaatatggtggcgactgatagctgtagcaaaagtactttttttttgcagcgagagaagttattgagttttattactagagacaggaataaattccac

SEQ ID NO: 709 - protein, 201 aa, Picea sitchensis
MAQEEPQNGEVKLIERPIDGGKKHPLENAWTFWFDNPSGKSKSAAWGSSLRSVYTFKTVEDFWCLYNNVFLPSKLPSGADFHCFKSGIEPKWEDLICAHGGKWTATNTRGGKAGLDQLWLNTLLAMIGEQFDEGDEICGAVASVRARQEKIALWTRTATNEAAQMSIGKQWKEFIDYNEKIQYMFHEDAKKDKAARNRYTL

SEQ ID NO: 710 - DNA, 1906 bp, Pinus taeda
gtggatccaactgtacctgcgacccttgccatttaacacctaatacaaccatacctagccggactctatcacatatactattaatactcatttgcaattgcaagggtcgcaggtacagttggatccacacttgcaaccgccagaagcgcagcacccactctctcccgacacagtagcagaaccctcaaaatatcccatgtcagaagccgtggctgcaaagaggggcgcctccactgttttttcactaaaagaaaaatcaaaatatcaaatatttattctcaaactaagccataccaacgaccatggcacctctatagtatattataatgaagtctacatagcagagcagagtagttgttatagtatattataatgaagtctacatagtagttgttattattattgttgcagtggtaggcgttgcagatcaagggcagggtttgtagcagtagcactttcggctggtgatgtggaaatcgcagcttcccgttggaaatccctcagttcggcaaacatttttgcagttggtgctgctcacgcagtaccctttgaacttcccacttggggttttgcacattcgaccctctgccacttgaacttccgtcatcccaatggttataacgagcagcaccagcagaaaaagggcactgagtcgagtgccaactcccttgcccgccattatcgatctcccctcttttcttacagacaacacgcttcaaagttggagtgaaggtgagataagaatggcgcaggaagaaccccagaacggtgaagctactctgatagagaggcctattgatggcgggaagaagcatgcattggagaacgcatggactttctggttcgacaacccatccgggaaatcgaagtccgcagcatggggcagctcccttcgttccgtctatacattcaggacggttgaagatttctggtgtttatacaacaacgtgtttctgccaagcaagctgcccgcaggggcagatttccactgctttaaagcgggtatagagcccaagtgggaagaccttacatgtgctcacggaggaaagtggactgccactaacacccgaggcggcaaggctggattggatcaactatggcttaacactctgttggccatgatcggtgaacaatttgatgaaggcgatgaaatttgtggtgctgtggctagtgtgagagctagacaagaaaaaattgccttgtggaccagaactgccaccaatgaagctgcccagatgtcaattggtaagcagtggaaagagttcctcgactataacgaaaagatccattacatgttccatgaagatgcaaagaaggataaatctgcaagaaatagatatacaatataaagttaaattttaaagtatctattttgcctctgcacctgtgagaaaccatatatgcactgggaaatggttcggcactgactgaagtgtgttgatacattcttataagaaagataaaggcagctatagtgtgttagttattgtcaactgtccatgatccaacgttgtctgcgaaaagtgtattttcatggaagacacgtttatttagtgtctgttttcccttttgaatattacaatcatagtacctgttgtaatttgtcaggtcacctcatataatattttgaatgttgtgtagcaaccgtgaggacacgaggacaccgttataagagttaagttgcatttggaaaatattaatacggtggggactgtggtagctgtagcaaaagtacattttcttttctgcagtaagagaagttaatgagttttattgctagggacaggaataaattccacataattttatctagctcttaacctggttgcatctttgccaatgtgtacatcgtcgtgcaggaatacaatgtttccattttctagacagctgggcttgggaatttttg

SEQ ID NO: 711 - protein, 245 aa, Pinus taeda
MVITSSTSRKRALSRVPTPLPAIIDLPSFLTDNTLQSWSEGEIRMAQEEPQNGEATLIERPIDGGKKHALENAWTFWFDNPSGKSKSAAWGSSLRSVYTFRTVEDFWCLYNNVFLPSKLPAGADFHCFKAGIEPKWEDLTCAHGGKWTATNTRGGKAGLDQLWLNTLLAMIGEQFDEGDEICGAVASVRARQEKIALWTRTATNEAAQMSIGKQWKEFLDYNEKIHYMFHEDAKKDKSARNRYTI

SEQ ID NO: 712 - DNA, 1515 bp, Pinus taeda
aaacttctatttaaaactctcgtgcggtggagtaattcaccatcaccagggcgggctctgagggtaatttggccttacagggtccggagttgtcctcaatcccaattgttccttcttctcttttaccaacgattacacttgtcagactacatattttccttcccatccttccagtgtgttgtccgctccccgaattcttcaaaatccaactgtaattgaaaacagacttcacagaagagatcaagaaactagggctcaaccgggactctagagcgttcacaggcttgaatcactgttttgtgcatcagttggaattctttccggcacttcgtttggaactcttcttcactgcattcggtttctttattcgtatagtgtgattgcagcagaagaagaatgggggaagcggagactggtgatccatcaaagttacatcaagaaagcggagaagcggaagaaggggaaattgtggagtcagtagaggcgattgaaaggcctatagagcctgcaaatacacacccactcgagcattcatggactttctggtttgataatccaaatgggaagtctaagcaggccacctggggtagttcgttgcgacctgtttacaccttcaatacagtcgaggacttctggtgtgtttttaacaatatacttcagccaagcaagttggtggctggttcagattttcattgcttcaaagatggaattgagccaaagtgggaagaccctaaatgtgcaaatggaggaaagtggactgttaccaccttgaaaggaaagcctattgtcgataccttctggctgcacactttgttagcaatgattggtgaacaattcgatgaaggtgatgaaatttgtggtgcagtggtcaatgtgcgtgctcgacaagataagattgccatgtggaccaagaatgctgcaaatgaagctgcacagatgagcattgggaagcagtggaaggagttccttgattacaatgaaaagatggcatacatgtttcatgatgatgcaaagaaaatggacaagatggctaaaaatcgctattatgtgtagtgatggtacctctcataatggaatgctgttatttcattgtttgtagttttttgctgcattattcctacgcgatcccttacacttgggttccttgtgttggctctgtgcattttctgcatgtgtttcagcagaataagttttcttaatatttaagattttaatgggtttgtttggtaatgttgtattattgtaatattcagtttttagcacagaagtggtttttgacggatcatgttgaatgcacaagttgatttgttttttcatatgtaggcttttgaagaaaactataaacgcaacaaggataagtgagatccaaattgtggattccggacttgttacgtggttataggctgacaatttgcagcagttagaaaagagagtaaaactactaagctgttattatctgtacctaccagttgaaccattggatttgtatgtaaaactaccaagttgttatgtcgt

SEQ ID NO: 713 - protein, 218 aa, Pinus taeda
MGEAETGDPSKLHQESGEAEEGEIVESVEAIERPIEPANTHPLEHSWTFWFDNPNGKSKQATWGSSLRPVYTFNTVEDFWCVFNNILQPSKLVAGSDFHCFKDGIEPKWEDPKCANGGKWTVTTLKGKPIVDTFWLHTLLAMIGEQFDEGDEICGAVVNVRARQDKIAMWTKNAANEAAQMSIGKQWKEFLDYNEKMAYMFHDDAKKMDKMAKNRYYV

SEQ ID NO: 714 - DNA, 612 bp, Selaginella moellendorffii
atgccggtggatgcgagcgagcgtgaggagggggaaatcgtggcgtcccccaaatccatcgtcaaggagaagcatccgctggagcactcgtggacgttttggttcgataaccctagcggtaagaacaagcagcagcagtggggaagctcattgcggccggtctacaccgtgagcactgtcgaggatttctggtgtctctacaataatctcgtgcagccgggtcgattgatcagtggggcggactttcactgcttcaaggagggaatcaagcccgagtgggaagatccgaggtgtgcgaatggggggaaatggactgctgctccaccgcgaggtagcaagcaagcgctggatcagttctggctaaacactctgctcgctttgatcggtgagcaattcgatgaggctgatgagatctgtggcgtggtggtgagcgtgaggccgagaggagataagctctccttatggaccaagacggctaacaacgaagccgctcagatgagcattggaaggcaatggaaggaatttctcgagtaccaggacaggatcaacttcatgtttcacgaggatgcaaagcgtggtgattcgaaggcgagaaatcgctactctgtatga

SEQ ID NO: 715 - protein, 203 aa, Selaginella moellendorffii
MPVDASEREEGEIVASPKSIVKEKHPLEHSWTFWFDNPSGKNKQQQWGSSLRPVYTVSTVEDFWCLYNNLVQPGRLISGADFHCFKEGIKPEWEDPRCANGGKWTAAPPRGSKQALDQFWLNTLLALIGEQFDEADEICGVVVSVRPRGDKLSLWTKTANNEAAQMSIGRQWKEFLEYQDRINFMFHEDAKRGDSKARNRYSV

SEQ ID NO: 716 - DNA, 966 bp, Antirrhinum majus
taaccctagctctcagaactgagaaggaacaaaaaaaccaaaacccttctctcgttctctctctctctctaaaaacacttccaatttcatcacaacaatggcgaccgaagttgctgctgttactgttgcaccagagctcccaacggaggtgattgagaagcaaccgcacaagctcgagagaaaatggacgttttggttcgacaatcaatccaagcccaaacaaggcgccgcttggggcagttctcttcgcaaaggctacacttttgaaactgtcgaagaattctggtgtttatatgatcagatattccgaccaagcaagttcccggcaaatgccgactttcacttattcagagccggagtggagcctaaatgggaagaccctgagtgtgcaagtggaggcaagtggactgtttcagctaacagaaatgctaatctggacaacttgtggcttgaaactttaatggctctaattggagagcagtttgacgtggctgatgagatttgtggagtcgtcgcgagcgtgcgccaaaggcaggacaaactctcattatggaccaagactgctgccaatgaagctgtccagatgggcatcgggaggaagtggaaggaaatcattgatgtcactgataaaatatcttacagctttcatgatgatgccaaaagcagatcagcaaaaagtcgatacagcgtgtaaagatcctcgtgccacattgtcgagcttgttctggtttccagtttgatcagaacgcagaaaacggtcattagtttaagctcttttctagtcgatgactgatgtcttgtcaatcagatgtttgtgtctgtgtgtgctattttatatttgaaccaattgttgcactgttgtcctttttgatatcagcctggatgattttacaggtttggcaagcattgccttggagaaaatagaaacattttgggcatacttgttatactaatcacaattttgtg

SEQ ID NO: 717 - protein, 198 aa, Antirrhinum majus
MATEVAAVTVAPELPTEVIEKQPHKLERKWTFWFDNQSKPKQGAAWGSSLRKGYTFETVEEFWCLYDQIFRPSKFPANADFHLFRAGVEPKWEDPECASGGKWTVSANRNANLDNLWLETLMALIGEQFDVADEICGVVASVRQRQDKLSLWTKTAANEAVQMGIGRKWKEIIDVTDKISYSFHDDAKSRSAKSRYSV

SEQ ID NO: 718 - DNA, 898 bp, Arabidopsis thaliana
ctctctgtccctctctcgtaaccaaaagccgtctcagaagaaaactcaactgcgaagaatatggcgaccgatgatgtgaacgagcctctcccggcggcggcggaattaccggcgacagaggcggagaaacaaccacacaagctcgaaagaaagtggagtttctggttcgataaccaatcaaagaaaggcgccgcctggggagcttctcttcgtaaagcctatactttcgacaccgtcgaagatttttggggattgcacgagactatatttcagactagcaaattgacagcgaatgctgaaattcacttgttcaaagctggtgttgagccaaagtgggaagatccagagtgtgctaatggaggaaagtggacttgggttgttactgctaataggaaggaagctttagacaaaggctggcttgaaactttgatggctttgattggagagcaatttgatgaagcagatgagatttgtggtgtggttgctagtgtccgtccacagtcgaagcaagacaagctctccttgtggactaggacgaagtctaatgaagctgttctgatgggtattgggaagaagtggaaggagatacttgatgtcaccgacaagataactttcaataaccatgatgattccagaagaagccggttcactgtctgaagaaacgagtgtgaagccagaggaagatgcaatatggctttttttgtgatactgtttggtcggtttactcaaatagctgagacatttagggacattcactttgaggtgtaaactctacaaagttttctgtttcattaaaatgattttttgttataaattaagttgagttatataaatctctttcgaaaccaccacttgttagacaaatacagagataatatactcttattagcaacaccct

SEQ ID NO: 719 - protein, 198 aa, Arabidopsis thaliana
MATDDVNEPLPAAAELPATEAEKQPHKLERKWSFWFDNQSKKGAAWGASLRKAYTFDTVEDFWGLHETIFQTSKLTANAEIHLFKAGVEPKWEDPECANGGKWTWVVTANRKEALDKGWLETLMALIGEQFDEADEICGVVASVRPQSKQDKLSLWTRTKSNEAVLMGIGKKWKEILDVTDKITFNNHDDSRRSRFTV

SEQ ID NO: 720 - DNA, 968 bp, Amborella trichopoda
ggtctggctctctagagactggcgtcttttctacagttgcagaggctcaacaatgggggagggaggttcagagactgaacaaaaaccacagaacgatgaatccatggattcaatccccgcaccaccaccatcaaagcatcgcctgcaacacaaatggaccttctggtttgataacccatccaaatccaagcaaggagcttcatggggttcatctcttcgacctgtttactcctttgacacagtcgaggacttttggtgcctttatgataacatttttcgaccgagcaaattacaggttaatgctgatttccattgctttaagtatgggattgagcccaagtgggaggatcctgtgtgtgcaagtgggggcaagtggactgttccagttgctaataggaagcccatgcttgaaactatgtggcttgaaacattgatggctttgattggagagcaatttgaagaaggtgaggacatatgtggggttgttgctagtgtgcgtgcaaggcaggataagctttctctttggactaggactgcatcaaatgaagctgctcaggtgagcattggtaggcagtggaaagagataactgatttcacggagaagattggatacagtgtccatgatgatgccagaaaggatagacaatcaaaaagatatactgtctagtacatggtattggtgtgttctttttcttccgtgttcttaagagctcatatgattttaatgacccatcttgttctgttttaatagtatgttgaacttttaacaatgaaatattgatggctctgtaaatctgtaccttggtctctttcatgtattcttctttcttatactatttttgcttcaaacttcaaagtctaggatgagaaatggggaaacaagtttctgacagtgttagttatttttgattccaagaaaggagtctcactgttattttggaatggaagagaataattccagtgttttt

SEQ ID NO: 721 - protein, 204 aa, Amborella trichopoda
MGEGGSETEQKPQNDESMDSIPAPPPSKHRLQHKWTFWFDNPSKSKQGASWGSSLRPVYSFDTVEDFWCLYDNIFRPSKLQVNADFHCFKYGIEPKWEDPVCASGGKWTVPVANRKPMLETMWLETLMALIGEQFEEGEDICGVVASVRARQDKLSLWTRTASNEAAQVSIGRQWKEITDFTEKIGYSVHDDARKDRQSKRYTV

SEQ ID NO: 722 - DNA, 792 bp, Brassica napus
  misc_feature (785)..(790): n is a, c, g, or t
ggattcacaagttgcgaagaatatggcgaccgaggatgtgaacgaagcccttgcggcggcggaagtaacggagaagcagcctcataagctcgaaagaaaatggtgtttctggttcgataaccaatctaagcaaaagcaaggcgacgcctggggagcttcccttcgtaaagcctgtaccttcgacactgtcgaagatttctggggtctgcacgagactatattcatccctagcaaattgacgccgaatgctgaaattcacatgttcaaagctggtgttgagcccaagtgggaagatccagagtgtgctaatggcggaaagtggacttatgttgttgccaacagcaggaagcaagctttagacaaggcttggcttgaaactttgatggctttgattggagagcaattcgatgaggcagatgagatttgtggtcttgttgctagtgtgcgccaaaagcaagacaagctctcattgtggacaaggactaaatcaaatgaagctgtcctgatgagtattggaaagaagtggaaggcgctacttgacgtcaccgacaagataactttcactaaccatgatgattctagaagaagtcggttcactgtctgaaacgaagacgcaagaggaagatgaaagatgccttttttcttccttattttgtcggtctactcaaatagctgagacctttagggccacttcagtttgaggtgtaactctacaaaaaaaattatgtttcacacagatttttaatatcatgtccagctatataaattcacttttgaaagcaaannnnnnaa

SEQ ID NO: 723 - protein, 193 aa, Brassica napus
MATEDVNEALAAAEVTEKQPHKLERKWCFWFDNQSKQKQGDAWGASLRKACTFDTVEDFWGLHETIFIPSKLTPNAEIHMFKAGVEPKWEDPECANGGKWTYVVANSRKQALDKAWLETLMALIGEQFDEADEICGLVASVRQKQDKLSLWTRTKSNEAVLMSIGKKWKALLDVTDKITFTNHDDSRRSRFTV

SEQ ID NO: 724 - DNA, 768 bp, Brassica oleracea
ggcgaagaagaatatggcgacagaggatgtgaacgaagcccttgcggcggcggaggtaacggcgatagaatcgacggagaagcagcagcctgctcataagctcgaaagaaagtggagtttctggttcgataaccaatcgaaacccaagcaaggcgccgcctggggagcttccctccgtaaagcatgtaccttcgataccgtcgaagatttctggggtttgcacgagactatcttcgttcccagcagattgacacccaacgctgacattcacatgttcaaagctggtgttgagcccaagtgggaagatcctgagtgtgctaacggcggaaagtggacttatgttgttaccaacaacaggaagcaagctttcgacaaggcttggcttgaaactttgatggctttagttggagagcagtttgatgaggcagatgagatttgtggtgtggttgctagtgtccgccaaaagcaagacaagctctccttgtggactaggactaaatctaatgaagctgttctgatgggtattgggaagaagtggaaggagatacttgatgtcaccgacaagatagctttcactaaccatgatgatgcaagaagaagtcgatttagtgtctgaagagcagacaagtgtgtgttgagcctgatgaagatgcaatatggctattctcttgcattgtttgagcggttttttcttgcaactctacaaagttttttgtttcaataaaaatatttttcttaatattaagttcagttatataaatcactttg

SEQ ID NO: 725 - protein, 200 aa, Brassica oleracea
MATEDVNEALAAAEVTAIESTEKQQPAHKLERKWSFWFDNQSKPKQGAAWGASLRKACTFDTVEDFWGLHETIFVPSRLTPNADIHMFKAGVEPKWEDPECANGGKWTYVVTNNRKQAFDKAWLETLMALVGEQFDEADEICGVVASVRQKQDKLSLWTRTKSNEAVLMGIGKKWKEILDVTDKIAFTNHDDARRSRFSV

SEQ ID NO: 726 - DNA, 765 bp, Brassica oleracea
gaacgcgtccggacagtcttcacagtaacattccaaatctctctctcattcacaagttgcgaagaatatggcgaccgaggatgtgaacgaagaagcccttgcggcggcggaagtaacggagaagcagcctcataagctcgaaagaaaatggtgtttctggttcgataaccaatctaagcaagagcaaggcgctgcctggggagcttcccttcgtaaagcctgtaccttcgacactgtcgaagatttctggggtttgcacgagactatattcatccccagcaaattgacgccgaatgctgaaattcacatgttcaaagctggtgttgagcccaagtgggaagatccagagtgtgctaatggcggaaagtggacttatgttgttgccaacagcaggaagcaagctttagacaaggcttggcttgaaactttgatggctttgattggagagcaattcgatgaggcagatgagatttgtggtcttgttgctagtgtgcgccaaaagcaagacaagctctcattgtggacaaggactaaatcaaatgaagctgtcctgaatgaagtattggaaagaagtggaaggcgctacttgacgtcacacgacaagataactttcactaaccatgatgattctagaagaagtcggttcactgtctgaaacgaagacgcaagaggaagatgaaagatgccttttttcttccttactttgtcggtctactcaaatagctgagacctttagggccacttcggtttgaggtgtaactctac

SEQ ID NO: 727 - protein, 195 aa, Brassica oleracea
MATEDVNEEALAAAEVTEKQPHKLERKWCFWFDNQSKQEQGAAWGASLRKACTFDTVEDFWGLHETIFIPSKLTPNAEIHMFKAGVEPKWEDPECANGGKWTYVVANSRKQALDKAWLETLMALIGEQFDEADEICGLVASVRQKQDKLSLWTRTKSNEAVLNEVLERSGRRYLTSHDKITFTNHDDSRRSRFTV

SEQ ID NO: 728 - DNA, 675 bp, Capsicum annuum
ccatcctcaaaattccccacacacaaaaaaaaaggagaggagatttttgccgcaaaaacaaacccaatggccaccgaagcaccaccaccggtagacacgacggaggttccgccgttcacggcggcggaaacggcggtgaaacagccacataagctagagagaaagtggacgttctggttcgataatcaatcaaagccgaaacaaggcgccgcttggggaagttctcttaaaaaagcatatactttcgataccgttgaagaattctggagtttatatgatcagatattcaagcccagcaagttgactgttaatgcggattttcatttgttcaaagctgggattgagcccaaatgggaagatcctgagtgcgctaatggtggcaagtggactgttacgagcagcagaaaagctaatcttgagactatgtggcttgagactctgatggcattggttggtgagcaatttgatgattcagaagatatatgtggagtggttgctagcgtgcgtaggagtcaggataaactttccttgtggactaagactgctaccaatgaagcagctcagatgggcattggtaggaagtggaaggagatcattgataccgaaaagatatcctatagtttccatgatgattctaaaagggagaggtcagctaagagccgatacaccgtgtga

SEQ ID NO: 729 - protein, 202 aa, Capsicum annuum
MATEAPPPVDTTEVPPFTAAETAVKQPHKLERKWTFWFDNQSKPKQGAAWGSSLKKAYTFDTVEEFWSLYDQIFKPSKLTVNADFHLFKAGIEPKWEDPECANGGKWTVTSSRKANLETMWLETLMALVGEQFDDSEDICGVVASVRRSQDKLSLWTKTATNEAAQMGIGRKWKEIIDTEKISYSFHDDSKRERSAKSRYTV

SEQ ID NO: 730 - DNA, 703 bp, Cichorium endivia
ggggagggaagagtagagaacacagagagagaaaagccgggaataatggcgactgacggcgcggcggtggatgttagcggagaagtggcggagcaaccccataggttagataagaagtggaccttttggtttgataatcaatctaaacctaaacaaggcgccgcgtgggggaataatcttcgcaacgtctacaccttcgatactgttgaagagttttggtgtttgtatgatcaggtattcaaacctagcaagttaccaggaaatgctgattttcatttgttcaaagctgggattgaacctaaatgggaagatccagagtgtgctaatggtggaaagtggactgttactagtggcagaaaagctacccttgaaacaatgtggtttgaaaccttgatggccttaattggtgagcaatttgatgagggtgatgaaatatgtggtgtggttgctagtgtacgtcaaaggcaagataaactttcattatggaccaagaatactgctaatgaagctgctcagatgagtattggacgaaaatggaaggaaattatagacgtgactgacaagatcacctacaacttccatgatgattccaagacaagatcatcaaaaggtcgttatagtgtgtgatgtcattctgttgacactagaagaatttgcagccatttcttactgaaaacaaagtttaattctcttttcaaaaaaa

SEQ ID NO: 731 - protein, 193 aa, Cichorium endivia
MATDGAAVDVSGEVAEQPHRLDKKWTFWFDNQSKPKQGAAWGNNLRNVYTFDTVEEFWCLYDQVFKPSKLPGNADFHLFKAGIEPKWEDPECANGGKWTVTSGRKATLETMWFETLMALIGEQFDEGDEICGVVASVRQRQDKLSLWTKNTANEAAQMSIGRKWKEIIDVTDKITYNFHDDSKTRSSKGRYSV

SEQ ID NO: 732 - DNA, 672 bp, Cichorium intybus
agcctggaataatggcgagtgacgtcgcggcgatatatgttagcggagaattggcggagcaaccccatacgttagataagaagtgcaccttttggtttgataatcaatctcaacctaaacaaggcgccgcgtggagtaataatcttcgcaacgtctacaccttcgataccgttgaagagttttggtgtttgtatgatcaggtattcaaacctagcaagttaccaggacatgctgattttcatttgctccaagctggaattgaacctaaatgggaagatccagagtgtgctaatggtggaaagtggactgttactagtggcagaaaagctacccttgaaactatgtggcttgaaactttgatggccttaattggtgaacaatttgatgagggtgacgaaatatgtggtgtggttgctagtatgcgtcaaaggcaagataaactttcattatggactaaaaatgctgctaatgaagctgctcagatgagtattggacgaaaatggaaggaaattatagacgtgactgacaagatcacctacaacttccatgatgattccaagacaagatcatcaaaaggtcgttatagtgtgtgatgatgtcattctgttgacagtagaagaaatttgcagcccttttcttactgaaaacaaagttaaattcccttttcaaaaa

SEQ ID NO: 733 - protein, 193 aa, Cichorium intybus
MASDVAAIYVSGELAEQPHTLDKKCTFWFDNQSQPKQGAAWSNNLRNVYTFDTVEEFWCLYDQVFKPSKLPGHADFHLLQAGIEPKWEDPECANGGKWTVTSGRKATLETMWLETLMALIGEQFDEGDEICGVVASMRQRQDKLSLWTKNAANEAAQMSIGRKWKEIIDVTDKITYNFHDDSKTRSSKGRYSV

SEQ ID NO: 734 - DNA, 915 bp, Citrus sinensis
gggggggaaaaaaatataattaatagaaacaaagaagagagagatatggcaacaagtgaggaggcaagcgcgacggcggcggcggaggtgccgccgcaatcacagctgcacaagctcgagagaaaatggacgttttggttcgacaacatatcaaagcccaaacagggcgccgcgtggggctcctctatgcgcaaagtctacaccttcgacactgtcgaagaattttggtgtttgtatgaacagatattcaagccaagccggttgccaatgaatgcggatttccatttgttcaaaactgggatagaaccaaagtgggaagatcctgagtgtgcaaatggaggaaagtggtcggtcactagcaacaggaaggctaaccttgataccatgtggcttgaaacaatgatggccctgattggagagcaatttgatgaggtggatgagatttgtggagttgttgctagtgtacgccagaggcaggacaaacttgccttatggaccaagacagcagcaaatgaagctgctcagatgggcattggaaagaagtggaaggagatccttgatgtcactgataggatcacttacagcttccacgatgactctagaagggatcgatcagtgaaaagtcgatacagtgtgtgaactcaaaagtgaccattttgtcgcagtagcctgtacttgtagttgccaaattgtggcttagaccgatgaatctgtttctgtattttttgtgctctatttaccataaacaattaaacattagatacttcaaatgtgttgccatatgcctttagacatgtaatacaatgatttctattgttttgatataggagatattgagaaatttttttgtgacccagtttgtttgtagttttgtactactctgttttgttcaaatagaactctcttgaattgttc

SEQ ID NO: 735 - protein, 197 aa, Citrus sinensis
MATSEEASATAAAEVPPQSQLHKLERKWTFWFDNISKPKQGAAWGSSMRKVYTFDTVEEFWCLYEQIFKPSRLPMNADFHLFKTGIEPKWEDPECANGGKWSVTSNRKANLDTMWLETMMALIGEQFDEVDEICGVVASVRQRQDKLALWTKTAANEAAQMGIGKKWKEILDVTDRITYSFHDDSRRDRSVKSRYSV

SEQ ID NO: 736 - DNA, 797 bp, Carthamus tinctorius
  misc_feature (720)..(720): n is a, c, g, or t
cttggcgggggatctgctgatatgagatcgagatcgatcgattgatcgatttctttctttctttctttctttctttctttctttggtgggtgggtggtggtggtggtgggaaaagaatggcgtctgacgtagaagcgccggctgacaaacagtgtcagaaattagagaggagatggacgttttggttcgataatcaatcaaaacctaaacaaggcgctgcttggggtaacaaccttcgcaacggctacaccttccaaactgtccaagagttctggtgtttgtatgatcaggtgttcaagccaagcaagttaccagcaaatgctgattttcatttgttcaaagctgggattgagcctaaatgggaagatccagagtgtgctagtgggggcaagtggacaattactagtagcagaaagcctacccttgaaactatgtggcttgaaacattgatggccttaatcggggagcaatttgatgaggctgatgacatatgtggcgtagttgctagtgtgcgtcaaagacaggacaaactttcactatggacaaaaaatgcagccaatgaggctgctcagatgagcattggaaggaagtggaaggaaattatagatgtgaccgacaagatcatctacagcttccatgatgattctaagacaagaacatcacaaggtcgatataacgtgtagagttttgtatgtgaagatacaccactccaagacgagncaacccagtggcattatgctgaccccttacttgttcaagcaaagttatacagtcatgtttgatgttcattttttatt

SEQ ID NO: 737 - protein, 188 aa, Carthamus tinctorius
MASDVEAPADKQCQKLERRWTFWFDNQSKPKQGAAWGNNLRNGYTFQTVQEFWCLYDQVFKPSKLPANADFHLFKAGIEPKWEDPECASGGKWTITSSRKPTLETMWLETLMALIGEQFDEADDICGVVASVRQRQDKLSLWTKNAANEAAQMSIGRKWKEIIDVTDKIIYSFHDDSKTRTSQGRYNV

SEQ ID NO: 738 - DNA, 897 bp, Carthamus tinctorius
tagtttgcaacttgcttctgaactgaaaccccctttctctctctgagaggagaagaagaacacaaagcctacaacaatggcgactgatgaggcggcggcagtggcggatgtcagtggaggagaagtggctgggaggcagccccataggttagataagagatggaccttttggttcgataatcaatctaaacctaagcaaggcgctgcttggggaaataatctacgcaaagtctacaccttcgataccgttgaagagttttggtgtttgtatgatcaggtgttcaagcctagcaagttgccaggaaatgctgatttccatttgttcaaagatgggattgagcccaaatgggaagatccagagtgtgccaatgggggcaagtggacagttattactagtggcaaaaaggctacccttgagactatgtggtctgaaactttaatggccttaattggcgagcaatttgacgaagctgatgaaatatgtggtgtcgttgctagtgtccgtcaaaggcaggataagctttcattatggactaagaatgcagctaatgaggcagctcagatggccattggaagaaagtggaaagatatcatagacgtgaacgacaagatcacctacaactttcatgatgattccaagacgagagcatcaaaaggtcgttacagcgtgtaaggtcattctgttgaagatttagaagcacttgcaggccctttcttaccacaaactaagtcgaattgtgtccaccttttacattgttgtatttgatatgatacagttgatgtttgttcaagcataatgttgtcaggaaatttctttttgtctgctattttgttgatgtacaaccaaattttgaattttcttaattttggacttcatgatacctattattaacgcaa

SEQ ID NO: 739 - protein, 198 aa, Carthamus tinctorius
MATDEAAAVADVSGGEVAGRQPHRLDKRWTFWFDNQSKPKQGAAWGNNLRKVYTFDTVEEFWCLYDQVFKPSKLPGNADFHLFKDGIEPKWEDPECANGGKWTVITSGKKATLETMWSETLMALIGEQFDEADEICGVVASVRQRQDKLSLWTKNAANEAAQMAIGRKWKDIIDVNDKITYNFHDDSKTRASKGRYSV

SEQ ID NO: 740 - DNA, 758 bp, Carthamus tinctorius
ggcgggggactgaactgaatcgagatcgatcgattgatcgatttctttctttctttctttctttctttctttctttggtgggtgggtggtggtggtggtgggaaaagaatggcgactgacggagaagcgccggctgagaaacagtgtcagaaattagagaggagatggacgttttggttcgataatcaatcaaaacctaaacaaggcgctgcttggggtaacaaccttcgcaacggctacaccttccaaactgtccaagagttctggtgtttgtatgatcaggtgttcaagccaagcaagttaccagcaaatgctgattttcatttgttcaaagctgggattgagcctaaatgggaagatccagagtgtgctagtgggggcaagtggacaactactagtagcagaaagcctacccttgaaactatgtggcttgaaacattgatggccttaatcggggagcaatttgatgaggctgatgacatatgtggcgtagttgctagtgtgcgtcaaagacaggacaaactttcactatggacaaaaaatgcagccaatgaggctgctcagatgagcattggaaggaagtggaaggaaattatagatgtgacagacaagatcatctacagcttccatgatgattctaagacaagaacatcaaaaggtcgatataacgtgtaaaagtgttatgttgaagatacaccactccaagacgagcaaacaaagtggcattatgctgacccccttacttgttcaaaccaaag

SEQ ID NO: 741 - protein, 188 aa, Carthamus tinctorius
MATDGEAPAEKQCQKLERRWTFWFDNQSKPKQGAAWGNNLRNGYTFQTVQEFWCLYDQVFKPSKLPANADFHLFKAGIEPKWEDPECASGGKWTTTSSRKPTLETMWLETLMALIGEQFDEADDICGVVASVRQRQDKLSLWTKNAANEAAQMSIGRKWKEIIDVTDKIIYSFHDDSKTRTSKGRYNV

SEQ ID NO: 742 - DNA, 805 bp, Euphorbia esula
  misc_feature (7)..(8): n is a, c, g, or t
  misc_feature (10)..(11): n is a, c, g, or t
acctganngnngaagaagaccatggctgccgaagaagctgcaacagaagcaaccatcacagagcaaacaccggttgcaatagagccgtcgctgccccacaagctcgagagaaagtggactttttggttcgataatcaatccaaacccaaacaaggcgccgcctggggtacctctcttcgcaacatcttcactttcgataccgttgaagaattttggtgtttgtatgaccaaatattcaagccgagcaaactcacagcaaatgcagatttccacttatttaaagctggagttgaaccaaaatgggaagatcctgagtgtgctaatggaggaaaatggactgttacatgtagcaggaaggctctcctcgataccatgtggctagagacgatgatggctttgattggggaacaatttgatgactctggtgatatctgtggagttgttgcaagtgttagacaaaggcaggataagcttgctttgtggaccaagtcagcttccaatgaggctgttcagatgggaattggcaagaagtggaaagagatccttgatgtcactgataagatcacatacagcttccatgacgattcaagaagagacagatctgtcaaaagtcgatacaatgtatgagcacaagcactctcctgttaaatttttgttcacatgattggaaacaatgagaagccggaaaagtatttccaaagaagtgccagaatagttacagttttaattcatccttagttttgttattgaacaattttcttgttatgccagagtatttttattgtagcatctggtaacctgtatg

SEQ ID NO: 743 - protein, 201 aa, Euphorbia esula
MAAEEAATEATITEQTPVAIEPSLPHKLERKWTFWFDNQSKPKQGAAWGTSLRNIFTFDTVEEFWCLYDQIFKPSKLTANADFHLFKAGVEPKWEDPECANGGKWTVTCSRKALLDTMWLETMMALIGEQFDDSGDICGVVASVRQRQDKLALWTKSASNEAVQMGIGKKWKEILDVTDKITYSFHDDSRRDRSVKSRYNV

SEQ ID NO: 744 - DNA, 865 bp, Festuca arundinacea
cgcacgaggctctcgcgacccatccttcacacctacaaaaccctccaaaagcgaaggcggcggcgagacatggcggaggtccaagccgttgttcctgtggcggtggcggagacccctgaggtcgcggcggagagcgacgcgggtgcgccggcggcgaaggggcctcacaagctgcagcggcagtggaccttctggtacgacatccagaccaagcccaagcccggcgccgcctggggcagcacgctcaagaagggctacaccttcgacaccgtcgaagagttctggtgcttgtatgatcagattttcaagccaagtaagttgcaaggaagtgctgattttcatttattcaaggctggggttgaaccaaagtgggaagacccagagtgcgcaaatgggggaaaatggactgtgatatccagcagaaagcccaaccttgatactatgtggcttgaaacctgcatggctttgattggagagcagtttgatgaaagccaggaaatttgtggagttgttgctagtgtccgccagagacaggataagctttcattgtggaccaagactgcaagtaatgaagctgttcaggtagacattggcaagaaatggaaggacattgttgactacaatgataagatgacctacagcttccatgacgactccagaagtcagaaacccagcagaggtgggcgatacaccgtgtaaggctgcacatgatgaagcttgcagctcggagaagtggcagatgttcgaacagcctcgactgatgttgtttgaggcaattttcaaatctattatgtcgttttgctctctgatagcttgtggttaagagaatacaaagttattgtatgcactcaatttttctctcagt

SEQ ID NO: 745 - protein, 209 aa, Festuca arundinacea
MAEVQAVVPVAVAETPEVAAESDAGAPAAKGPHKLQRQWTFWYDIQTKPKPGAAWGSTLKKGYTFDTVEEFWCLYDQIFKPSKLQGSADFHLFKAGVEPKWEDPECANGGKWTVISSRKPNLDTMWLETCMALIGEQFDESQEICGVVASVRQRQDKLSLWTKTASNEAVQVDIGKKWKDIVDYNDKMTYSFHDDSRSQKPSRGGRYTV

SEQ ID NO: 746 - DNA, 882 bp, Fragaria vesca
caacaacaatggcgacagaagtagcagcagcatcaccggcgccgccgctatccgacgtggaggacaccagcgccgccgcggcggagaccaagagcagcgggccccagaagctcgagagaaagtggaccttctggttcgacaaccaatctaagccaaagcagagcggcgctgcttggggctcctctctcaaaaaagcttacacctttgaaactatccaggagttttggtgtctgtatgatcagatattcaagccgagcaagtttccagcaaatgctgagttccacttgttcagggctgggattgaacctaagtgggaggatcctgaatgtgctaatggagggaagtggactgtaaccatcaaccggaaggccaaccttgataccatgtggctagaaactttgatggcactgattggagagcaatttgatgagggtgatgagatttgtggagtggtagcaagtgtgcgccagaggcacgacaaactttcattgtggactaggaatgctgcaaatgaggctgcgcagatgagcattgggaggaagtggaaggagatgatcgatgttactgataagatcagttactccgtccatgaagatagcaaaaaggacagatcagcgaagcctcgatacagtgtgtgatcattttctcaaccattaccaagcaacaccatcacaatttttctgcagttcgctcatttactgagaaacactagaggatacatctcacaacttctctttttgatcttataatgtaatatcattttgttctctgtgctacactgttttgacgtttgtttgtaatgcattcatgatttatgtggatcgacaatcagattatttgaatgttcatgttgctatttcaagatactatagatgcatgata

SEQ ID NO: 747 - protein, 209 aa, Fragaria vesca
MATEVAAASPAPPLSDVEDTSAAAAETKSSGPQKLERKWTFWFDNQSKPKQSGAAWGSSLKKAYTFETIQEFWCLYDQIFKPSKFPANAEFHLFRAGIEPKWEDPECANGGKWTVTINRKANLDTMWLETLMALIGEQFDEGDEICGVVASVRQRHDKLSLWTRNAANEAAQMSIGRKWKEMIDVTDKISYSVHEDSKKDRSAKPRYSV

SEQ ID NO: 748 - DNA, 855 bp, Gossypium arboreum
gataaaatctatggcaagcgaggcggctgtggaagttaacgccatatcggcggcggcgccagaggcggcaacaacaacaggggcagagaagcaaccacataagctcgagagaaagtggaccttttggtttgataaccaaacagggcataaacaaggcgccgcttggggtacctctctacgcaaggtttacacatttgacaccgtagaagaattttggtgtttgtatgatcaaatattcaagcccagcaagttgcccgggaatgctgacttccacttgtttaaggccggaattgagcccaaatgggaagatcccgagtgtgctagtggaggaaagtggtctgtcactagcaacagaaaggctaatctcgagaatatgtggcttgaaaccttgatggcattgatcggggagcaattcgatgaggcggatgagatttgtggtgtagttgccagcgtacgcccaaggcaggacaaacttgcattatggaccaagacagcaacgaacgaaactgctcagatgggcatcgggaggaagtggaaggagatcattgacgtcaacgataaaattacttatagcttccatgatgactcgagaagggaaagatcggcaaaaggccgatacaatgtttgaaccatttttgccggtggtctttggggcttggaaatatttttaagggaagtggttttttttaaatggaataccattcgattttaaaattttttttgtcagaggattttttttaattctaacatatggaaaatttttctaacaccccttcattataaatttttgggtaaaggaaattttgaaaaattacaatattaacttgggttacaggattttttcaaaaaaaatag

SEQ ID NO: 749 - protein, 205 aa, Gossypium arboreum
MASEAAVEVNAISAAAPEAATTTGAEKQPHKLERKWTFWFDNQTGHKQGAAWGTSLRKVYTFDTVEEFWCLYDQIFKPSKLPGNADFHLFKAGIEPKWEDPECASGGKWSVTSNRKANLENMWLETLMALIGEQFDEADEICGVVASVRPRQDKLALWTKTATNETAQMGIGRKWKEIIDVNDKITYSFHDDSRRERSAKGRYNV

SEQ ID NO: 750 - DNA, 941 bp, Gerbera hybrid
ctccacttcctcttcaataggctttaggaaggggaaagtagaaacaaagaaaacatatggcaagtgaggcggcggaggaagctaacgtccctgcagcggctgcggcggaagcacccacaacagggaccgagaagcaaccacataagcttgaaagaaagtggaccttttggtttgataaccaatcaaagcctaaacaaggcgctgcttggggttcctctttacgcaaagtttacacttttgacactgtagaagaattttggtgtttgtatgatcaaatattcaagcctagcaagttgcctggaaatgctgatttccacttgtttaaggctggaattgagcccaaatgggaagatcctgagtgtgctaatggaggaaaatggtctgtcactagcaacagaaaggctaatcttgagaacatgtggcttgaaagtttgatggcattgatcggggagcaatttgatgaggcagatgagatttgtggtgtagttgccagtgttcgccaaaggcaggacaaacttgcattgtggaccaagactgcaacgaatgaggctgctcagatgggtattggaaggaagtggaaggagatcattgacatcaatgataaaattacatatagcttccatgacgactctcgaagggaaagatcagcaaaaggtcgatacaatgtttgaaccatttgcaggtttctttgttcagcagtgtactctttatttgttacctattttgcatgtgagtttatgttatgtgataccaccaacaatcaagttccatgttagagacagttttgatattttaacacattgagaattttaccctattccttggatacttaatttgctgaatctcatagcatatgatgattctgggggccattagaattatgtacttggcaatgtttttggtgcttaacttggaaggttgaactagtttcagtttgagtg

SEQ ID NO: 751 - protein, 204 aa, Gerbera hybrid
MASEAAEEANVPAAAAAEAPTTGTEKQPHKLERKWTFWFDNQSKPKQGAAWGSSLRKVYTFDTVEEFWCLYDQIFKPSKLPGNADFHLFKAGIEPKWEDPECANGGKWSVTSNRKANLENMWLESLMALIGEQFDEADEICGVVASVRQRQDKLALWTKTATNEAAQMGIGRKWKEIIDINDKITYSFHDDSRRERSAKGRYNV

SEQ ID NO: 752 - DNA, 971 bp, Glycine max
ataatctcactcgtattagcgttgctgagagagaaagacaaatggcaacaagcgaagaagtggttgcggcggcgccggaggcagccgcgctggaggcagggctgaagcacaaactggagagaaaatggacgttttggtgcgacaaccaatccaaacccaaacagggcgctgcttggggtacctctcttcgcaaggtctacaccttcgacaccgttgaagagttctggtgtttgtatgatcaggtattcaagcccagcaagttgcaaatcaatgccgattttcacttgttcaagactgggattgaccctaaatgggaagatccagagtgcgccaatggaggaaagtggtcaatcaccagcaacagcggcaggaaggctaaccttgataacatgtggcttgaaactatgatggctttgattggggaacaatttgaggatgctgaggacatatgtggtgtggttgctagtgtgcgccagtggcaggacaaactttcgttgtggacaaagacagcagcaaatgaagctgcccagatgagcattggaaggaagtggaaggaaatcattgatgttaacgacaagataacatacaactttcatgatgattctagaagcaaaggagcaacaaagggtcggtacaccgtataaacaccgcaggagcatcttcttgcacttgtgctgggctgctggcaaggctgtaatatttgatatctttatcatgtgccatatgtactaagaacatgctactactttggtggggggttagttttatttttgttcactcaccccacttttgggtgttgatactatcatactcttctcatttttgaaatggtctgtcaaatttttcttcagagttcattggtagtttttttggtcacattctaaaagctttaaattttgaatatgtcgacacaagtttagcatgagtttgatgagttatttgttcaatcataattgtgatcgaacctacat

SEQ ID NO: 753 - protein, 200 aa, Glycine max
MATSEEVVAAAPEAAALEAGLKHKLERKWTFWCDNQSKPKQGAAWGTSLRKVYTFDTVEEFWCLYDQVFKPSKLQINADFHLFKTGIDPKWEDPECANGGKWSITSNSGRKANLDNMWLETMMALIGEQFEDAEDICGVVASVRQWQDKLSLWTKTAANEAAQMSIGRKWKEIIDVNDKITYNFHDDSRSKGATKGRYTV

SEQ ID NO: 754 - DNA, 866 bp, Gossypium raimondii
ctctctctctccacttcctcttcaataggctttaggaaggggaaagtagaaacaaagaaaacgtatggcaagtgaggcggcggaggaagctaacgtccctgcagcggctgcggcggaagcacccacaacagggaccgagaagcaaccacataagcttgaaagaaagtggaccttttggtttgataaccaatcgaagcctaaacaaggcgctgcttggggttcctctttacgcaaagtttacacttttgacactgtagaagaattttggtgtttgtatgatcaaatattcaagcctagcaagttgcctggaaatgctgatttccacttgtttaaggctggaattgagcccaaatgggaagatcctgagtgtgctaatggaggaaaatggtctgtcactagcaacagaaaggctaatcttgagaacatgtggcttgaaagtttgatggcattgatcggggagcaatttgatgaggcagatgagatttgtggtgtagttgccagtgttcgccaaaggcaggacaaacttgcattgtggaccaagactgcaacgaatgaggctgctcagatgggtattggaaggaagtggaaggagatcattgacatcaatgataaaattacatatagcttccatgacgactctcgaagggaaagatcagcaaaaggtcgatacaatgtttgaaccatttgcaggtttctttgttcagcagtgtactctctatttgttacctattttgcatgtgagtttatgttatgtgataccaccaacaatcaagttccatgttagagacagttttgatattttaacacattgagaattttaccctattccttggatacttaatttgctgaatctcatagcatatgat

SEQ ID NO: 755 - protein, 204 aa, Gossypium raimondii; identical to SEQ ID NO: 751

SEQ ID NO: 756 - DNA, 959 bp, Helianthus annuus
ggggccctttttagacgaagagagaagggtgagaaagccggaaatcatggcaactgacggcgcggcggtggaagttagcggagcatcggcggagcagactcctcatcggttagacaaaaagtggacgttttggttcgataatcaatctaaacctaaacaaggcgccgcttgggggaataatcttcgcgatgtttacaccttcgataccgtcgaagagttttggtgtttgtatgatcatgtattcaagccgagcaagctgcctggaaatgctgattttcatatgtttaaggctggggtggagcccaaatgggaagatccacagtgtgctaatggaggcaagtggacggttactagtagcagaaaggctggtcttgagactatgtggcttgaaacactaatggctttaatcggtgagcaattcgatgatgctgatgaaatatgtggtgtcgttgctagtgtccgtcaaaggcaggataaactttctttgtggactaagaacgcagctaatgaggctgctcagatgagcattggaagaaaatggaaggaaattatagatgtaactgacaagatcacttacaactttcatgatgattccaagacaagaacatcaaaaggtcgatacagcgtttgaagtcttcttattctgttgaagacatgcctacactgagtcgctaaaaagaatttgcaagctcttttactgcaaatcaagtagaattatgcctgtcttctaagttgtggtgatgtgtttaatgcctgtaatattcgggaattttcttttcatgcttcataagcttgaaatttacttttccattgatgtacaagcaaattttgcatttctttaattttggacatgtattgaaccttgctgcattattttctacctttgattgaagttttgactttgtattgcatgtgataaacagaactcttacttatcaatgtgtttgactagagtgttc

SEQ ID NO: 757 - protein, 194 aa, Helianthus annuus
MATDGAAVEVSGASAEQTPHRLDKKWTFWFDNQSKPKQGAAWGNNLRDVYTFDTVEEFWCLYDHVFKPSKLPGNADFHMFKAGVEPKWEDPQCANGGKWTVTSSRKAGLETMWLETLMALIGEQFDDADEICGVVASVRQRQDKLSLWTKNAANEAAQMSIGRKWKEIIDVTDKITYNFHDDSKTRTSKGRYSV

SEQ ID NO: 758 - DNA, 785 bp, Helianthus ciliaris
  misc_feature (744)..(744): n is a, c, g, or t
attgccctttttagacgaagagagacgcgtgagaaagccggaaatcatggcaactgacggcgcggcggtggaagttagcggagcatcggcggagcaggctcctcatcggttagacaaaaagtggacgttttggttcgataatcaatctaaacctaaacaaggcgccgcttgggggaataatcttcgcgatgtttacaccttcgacaccgtcgaagagttttggtgtttgtatgatcatgtattcaagccgagcaagctgcctggaaatgctgattttcatatgtttaaggctggggttgagcctaaatgggaagatccacagtgtgctaatggaggcaagtggacagttactagtagcagaaaggctggtcttgagactatgtggcttgaaacactaatggctttaatcggcgagcaattcgatgatgctgatgaaatatgtggtgtcgttgctagtgtccgtctaaggcaggataaactttctttgtggactaagaacgtagctaatgaggctgctcagatgagcattggaagaaaatggaaggaaattatagacgtaactgacaagatcacttataactttcatgatgattccaagacaagaacatcaaaaggtcgatacagcgtttaaagtcttattattctgttgaagacatgcctacactgagtcgctaaaaagaataccaagtagaattatgccggtcttctaagtgtggtgatatgtttaatggctgtaatattcangaattttcttttcatgcttcataagcttgaaatttactttt

SEQ ID NO: 759 - protein, 194 aa, Helianthus ciliaris
MATDGAAVEVSGASAEQAPHRLDKKWTFWFDNQSKPKQGAAWGNNLRDVYTFDTVEEFWCLYDHVFKPSKLPGNADFHMFKAGVEPKWEDPQCANGGKWTVTSSRKAGLETMWLETLMALIGEQFDDADEICGVVASVRLRQDKLSLWTKNVANEAAQMSIGRKWKEIIDVTDKITYNFHDDSKTRTSKGRYSV

SEQ ID NO: 760 - DNA, 739 bp, Helianthus exilis
  misc_feature (705)..(705): n is a, c, g, or t
cgggggccctttttagacgaagagagaagggtgagaaagccggaaatcatggcaactgacggcgcggcggtggaagttagcggagcatcggcggagcaggctcctcatcgactagacaaaaagtggacgttttggttcgataatcaatctaaacctaaacaaggcgccgcttgggggaataatcttcgcgatgtttacaccttcgacaccgtcgaagagttttggtgtttgtatgatcatgtattcaagccgagcaagctgcctggaaatgctgattttcatatgtttaaggctggggttgagcccaaatgggaagatccacaatgtgctaatggaggcaagtggacagttactagtagcagaaaggctggtcttgagactatgtggcttgaaacgctaatggctttaattggtgagcaattcgatgatgctgatgaaatatgcggtgtcgttgctagtgtccgtcaaaggcaggataaactttctttgtggactaagaatacagctaatgaggctgctcagatgagcattggaagaaaatggaaggaaattatagacgtaactgacaagatcacatataactttcatgatgattccaagacaagaacatcaaaaggtcgatacagcgtttgaagtcttcttattctgttgaagacatgcctacactgagtcgctaaaaagaatttgcaagctcttttaccgcanaccaagtagaattatgcctgtcttctaagttgtg

SEQ ID NO: 761 - protein, 194 aa, Helianthus exilis
MATDGAAVEVSGASAEQAPHRLDKKWTFWFDNQSKPKQGAAWGNNLRDVYTFDTVEEFWCLYDHVFKPSKLPGNADFHMFKAGVEPKWEDPQCANGGKWTVTSSRKAGLETMWLETLMALIGEQFDDADEICGVVASVRQRQDKLSLWTKNTANEAAQMSIGRKWKEIIDVTDKITYNFHDDSKTRTSKGRYSV

SEQ ID NO: 762 - DNA, 828 bp, Helianthus paradoxus
cggggccctttttagacgaagagagaagggtgagaaagccggaaatcatggcaactgacggcgcggcggtggaagttagcggagcatcggcggagcaaactcctcatcggttagacaaaaagtggacgttttggttcgataatcaatctaaacctaaacaaggcgccgcttgggggaataatcttcgcgatgtttacaccttcgacaccgtcgaagagttttggtgtttgtatgatcatgtattcaagccgagcaagctgcctggaaatgctgattttcatatgtttaaggctggggttgagcccaaatgggaagatccacagtgtgctaatggaggcaagtggacagttactagtagcagaaaggctggtcttgagactatgtggcttgaaacactgatggctttaatcggtgagcaatttgatgatgctgatgaaatatgtggtgtcgttgctagtgtccgtcaaaggcaggataaactttctttgtggactaagaacgcagctaatgaggctgctcagatgagcattggaagaaaatggaaggaaattatagacgtaactgacaagatcacttataactttcatgatgattccaagacaagaacatcaaaaggtcgatacagcgtttgaagtcttcttattctgttgaagacatgcctacactgagtcgctaaaaagaatttgcaagctcttatactgcaaaccaagtagaattatgcctgtcttctaagttgtggtgatatgtttaatgcctgtaatattcgggaattttcttttcatgcttcataagcttgaaatttacttttccattgatgtacaagcaaat

SEQ ID NO: 763 - protein, 194 aa, Helianthus paradoxus; identical to SEQ ID NO: 757

SEQ ID NO: 764 - DNA, 856 bp, Helianthus petiolaris
gcgggggccctttttagacgaagagagaagggtgagaaagccggaaatcatggcaactgacggcgcggcggtggaagttagcggagcatcggcggagcagactcctcatcggttagacaaaaagtggacgttttggttcgataatcaatctaaacctaaacaaggcgccgcttgggggaataatcttcgcgatgtttacaccttcgacaccgtcgaagagttttggtgtttgtatgatcatgtattcaagccgagcaagctgcctggaaatgctgattttcatatgtttaaggctggggttgagcccaaatgggaagatccacagtgtgctaatggaggcaagtggacagttactagtagcagaaaggctggtcttgagactatgtggcttgaaacactaatggctttaatcggtgagcaattcgatgatgctgatgaaatatgtggtgtcgttgctagtgtccgtcaaaggcaggataaactttctttgtggactaagaacgcagctaatgaggctgctcagatgagcattggaagaaaatggaaggaaattatagatgtaactgacaagatcacttataactttcatgatgattccaagacaagaacatcaaaaggtcgatacagcgtttgaagtcttctgattctgttgaagacatgcatgcctacactgagtcgctaaaaagaataccaagtggaattatgccggtcttctaagtgtggtgatatgtttaatgcctgtaatattcgggaattttcttttcatgcttcataagcttgaaatttacttttccattgatgtacaagcaaattttgcatttctttaattttggacatgtattgatgaaccatgctg

SEQ ID NO: 765 - protein, 194 aa, Helianthus petiolaris; identical to SEQ ID NO: 757

SEQ ID NO: 766 - DNA, 907 bp, Helianthus tuberosus
tttttagaagagagagacgcgtgagaaagccggaaatcatggcaagcgacggcgcggcggtggaagttagcggagcatcggcggagcagactcctcatcggttagacaaaaagtggacgttttggttcgataatcaatctaaacctaaacaaggcgccgcttgggggaataatcttcgcgatgtttacaccttcgacaccgtcgaagagttttggtgtttgtatgatcatgtattcaagccgagcaagctgcctggaaatgctgattttcatatgtttaaggctggggttgagcctaaatgggaagatccacagtgtgctaatggaggcaagtggacagttactagtagcagaaaggctggtctcgagactatgtggcttgaaacattaatggctttaatcggtgagcaattcgatgatgctgatgaaatatgtggtgtcgttgctagtgtccgtcaaaggcaggataaactctctttgtggactaagaacgcagctaatgaggctgctcagatgagcattggaagaaaatggaaggaaattatagacgtaactgacaagatcacttataactttcatgatgattccaagacaagaacatcaaaaggtcgatatagcgtttgaagtcttattattctgttgaagacatgcctacactgagtcgctaaaaagaataccaagtagaattatgccagtcttccaagtgtggtgatatgtttaatggctgtaatattcaggaattttcttttcatgcttcataagcttgaaatttacttttccattgatgtacaagcaaattttgcatttctttaattttggacctgtattgatgaaccatgctgcattattttctacctttgattgaagttttgactttgtattgcatgtgataaacagaactcttactt

SEQ ID NO: 767 - protein, 194 aa, Helianthus tuberosus
MASDGAAVEVSGASAEQTPHRLDKKWTFWFDNQSKPKQGAAWGNNLRDVYTFDTVEEFWCLYDHVFKPSKLPGNADFHMFKAGVEPKWEDPQCANGGKWTVTSSRKAGLETMWLETLMALIGEQFDDADEICGVVASVRQRQDKLSLWTKNAANEAAQMSIGRKWKEIIDVTDKITYNFHDDSKTRTSKGRYSV

SEQ ID NO: 768 - DNA, 749 bp, Hordeum vulgare
tctcgctgcggctcatcctccccatcccaaaaccctcggaaagcaaaggcggcggcgcgacatggcagaggtcgaagccgcgctcccggtggcagcaacgacagaaaccccggatgtcgcggccgagagcgacgcgggcgcggccgacgcgaaggcgccgcacaagctgcagcggcagtggaccttctggtacgacatccagtccaagcccaagcccggcgccgcctggggcacctcgctcaaaaagggctacaccttcgacaccgtcgaagagttctggtgtttatatgatcagattttccgtccgagtaagttggtaggaagtgctgattttcatttattcaaggctggggtagaaccaaagtgggaagatccagagtgcgcaaatgggggcaaatggactgtgatatctagcaagaaggccaaccttgataccatgtggcttgaaacgtgcatggctctgattggagagcagttcgatgaaagccaggaaatttgtggtgttgtctctagtgtccgccagagacaggataagctttcattatggactaagactgccagtaatgaagctgttcaggtagacattcgcgagatatggaaggaggttattgactccgaggataagatggggtacaggttccacgatgactcgagagagcataacccaagcagaggtggacgatacacccgtggaaggttgcccacatgatgaagacccgcgcctcggaaaagtgggcgtggtagggttc

SEQ ID NO: 769 - protein, 215 aa, Hordeum vulgare
MAEVEAALPVAATTETPDVAAESDAGAADAKAPHKLQRQWTFWYDIQSKPKPGAAWGTSLKKGYTFDTVEEFWCLYDQIFRPSKLVGSADFHLFKAGVEPKWEDPECANGGKWTVISSKKANLDTMWLETCMALIGEQFDESQEICGVVSSVRQRQDKLSLWTKTASNEAVQVDIREIWKEVIDSEDKMGYRFHDDSREHNPSRGGRYTRGRLPT

SEQ ID NO: 770 - DNA, 892 bp, Ipomoea batatas
acggccgggggattgcaaactacctcagtgattctggaaccagagatctatagcacgaaatggcaaccgagacggcagctgaattgacggaggctcctgcggcaccggtggccgagacggcgtccaaacagccgcacaagttggagaggaaatgggcgttctggtttgacaatcagtcaaagcctaagcaaggcgccgcctggggcagctctatgcgtaaggtctacactttcgacaccgttgaagaattctggtgcttgtatgatcagatatttaggcccagccaattacctgcaaatgctgattttcatttgtttaaggctggggttgagccaaaatgggaagatcctgagtgtgccaatggaggcaagtggactgtcggcatcagcaggaagccagctcttgacaccatgtggcttgaaactctgatggctttgattggggagcaatttgatgaagcagaggagatatgtggagtggttgccagtgtgcgtcagagacaggacagactttctttgtggaccaaaaatgcagccaatgaagcggctcagatgagcattgggaggaagtggaaagaggtcattgatgtaaccgataagctatcctatagcttccatgatgattctaaaagggaaaggtcagctaagagccgttatagtgtgtgaacgaacatcagcataatgcagcagcagggatgcaatggcattttgctatagagtaggaactgaagagcgcatgcacttatagctatcatttgtagacatttctcgaaattttttgacttgcaacatgtctcgtgtaatgatgtttttgttttccgagtttggtttagagtctgagtgtgttggcaaaacgtttcacgatgcaaaataaccatcccccttttcccctg

SEQ ID NO: 771 - protein, 201 aa, Ipomoea batatas
MATETAAELTEAPAAPVAETASKQPHKLERKWAFWFDNQSKPKQGAAWGSSMRKVYTFDTVEEFWCLYDQIFRPSQLPANADFHLFKAGVEPKWEDPECANGGKWTVGISRKPALDTMWLETLMALIGEQFDEAEEICGVVASVRQRQDRLSLWTKNAANEAAQMSIGRKWKEVIDVTDKLSYSFHDDSKRERSAKSRYSV

SEQ ID NO: 772 - DNA, 832 bp, Juglans hindsii x regia
ggagagaggcgaagcgagagagagaaaaaaaaaaaaaaaaaagaaatcatggcgagcgaggtagcgatagtggcggcgacggcttcggaggatacagtgacgaaacaacctcacaagttggagagaaagtggacgttctggttcgacaaccagtccaagccaaagcaaggtgccgcctggggcacctctctccgcaagctctacaccttcgacaccgtcgaagagttctggtgtttgtatgatcagatatttaggcccagcaagttgccggcaaatgcagatttccacttgttcaaagctgggattgaacctaaatgggaagatccagagtgtgctaatggtggaaagtggtccatccccagcagcagaaagactaatcttgataacatgtggctagaaactttgatggccttgattggagagcaatttgatgaggctgatgagatttgtggtgtggttgcgagtgtgcgaccgaggcaggacaaacttgcattgtggaccaagacagcggcaaatgaagccgtccagatgagcattgggaggaagtggaaggagatcattgatgttactgataaaatgacttacaacttccatgatgattctagaagggaaagaacagcgaaagttcgatacactgtgtaatcgtgcaattattttgctgtctggttttcttccatcagttgtggcatcacgatgaaagtcaatggaatttctatgatgttatttttgttatgatctacaagacgtgtagttgatatatagtttgctaagtgagatgtgtttaagggatgtaacgctcttaggtttttcatattttgccttttggtactta

SEQ ID NO: 773 - protein, 197 aa, Juglans hindsii x regia
MASEVAIVAATASEDTVTKQPHKLERKWTFWFDNQSKPKQGAAWGTSLRKLYTFDTVEEFWCLYDQIFRPSKLPANADFHLFKAGIEPKWEDPECANGGKWSIPSSRKTNLDNMWLETLMALIGEQFDEADEICGVVASVRPRQDKLALWTKTAANEAVQMSIGRKWKEIIDVTDKMTYNFHDDSRRERTAKVRYTV

SEQ ID NO: 774 - DNA, 790 bp, Lactuca perennis
cttggcggggaacccccttctttgagggaaagagagaacaagagaaagagaaaagccgggaacaatggcgactgacggcgcggcggtcgatcttgtcggagaagtggcggagcaggcccataggctagacaagaagtggacattctggtttgataatcaatctaaacctaaacaaagcgccgtttgggggaacaatcttcgcaacgtctacactttcgatactgttgaagagttttggtgtttgtatgatcaggtattcaagcctagcaagctgccaggaaatgctgatttccatttgttcaaagctgggattgagcctaaatgggaggatccggaatgtgctaatgggggaaagtggacagttactagtagcagaaaggctaaccttgaaactatgtggtttgaaactttgatggccttaattggtgagcaatttgatgaagctgatgaaatatgtggagtggttgccagtgtgcgtcaaaggcaggataaactttcattatggactaaaaatgctgctaatgaggctgctcagatgagtattggaagaaagtggaaggaaattatagatgtgactgacaagatcacctacaacttccatgatgattccaagacaagaacaccaaaaggtcgttacagtgtgtaatcacattctgttgacaatactagaacaatttgcagcctttctatttttaactgaaaaaccaagttgaattgtattcgccttctacatgttgtatttgaggaattttgtttttcttataagaaaatgttgattttcctataaaaa

SEQ ID NO: 775 - protein, 193 aa, Lactuca perennis
MATDGAAVDLVGEVAEQAHRLDKKWTFWFDNQSKPKQSAVWGNNLRNVYTFDTVEEFWCLYDQVFKPSKLPGNADFHLFKAGIEPKWEDPECANGGKWTVTSSRKANLETMWFETLMALIGEQFDEADEICGVVASVRQRQDKLSLWTKNAANEAAQMSIGRKWKEIIDVTDKITYNFHDDSKTRTPKGRYSV

SEQ ID NO: 776 - DNA, 904 bp, Lactuca sativa
cgggaatctcaaccccccttctttgagggaaagagagaacaatagagagagagagagatagaaaagccgggaacaatggcgactgacggcgcggcggtagatgttggcggagaagtggcggagcaaccccataggctagacaagaagtggacattctggttcgataatcaatctaaacctaaacaaggcgccggttgggggaataatcttcgcaacggctacactttcgacaccgtcgaagagttttggtgtctgtatgaccaggtattcaaacctagcaagcttccaggaaatgctgatttccatttgttcaaagctgggattgagcctaaatgggaagatccagagtgtgcaaatggagggaagtggacagttactagtagcagaaaggctaaccttgaaactatgtggtttgaaactttgatggccttaataggtgagcaatttgatgaggctgatgaaatatgtggtgtggttgctagtgtgcgtcaaaggcaggataaactttctttatggactaaaaatgctgctaatgaggctgctcagatgagtattggaagaaagtggaaggaaattatagatgtgactgacaagatcacctacaacttccatgatgattccaagacaagaacatcaaaaggtcgttacagtgtgtaatgacattcctagaacaatttgcagcttttttttttaagtcgaattgtgttggccttctacatgttgtatttgatgggatatggtaatcactgttgaggaattttgtttttttgttataagaaaatgttgattttcttacattttagacatcttttaatccctattgctgctttttaataagctatttgagatagtttattgcaatgaatcgatagatatgataatggtatttagtattcataattcc

SEQ ID NO: 777 - protein, 193 aa, Lactuca sativa
MATDGAAVDVGGEVAEQPHRLDKKWTFWFDNQSKPKQGAGWGNNLRNGYTFDTVEEFWCLYDQVFKPSKLPGNADFHLFKAGIEPKWEDPECANGGKWTVTSSRKANLETMWFETLMALIGEQFDEADEICGVVASVRQRQDKLSLWTKNAANEAAQMSIGRKWKEIIDVTDKITYNFHDDSKTRTSKGRYSV

SEQ ID NO: 778 - DNA, 888 bp, Lactuca serriola
  misc_feature (736)..(736): n is a, c, g, or t
cttggatcttcttttttggtgggagccggagagaagataatggcgagtgacgccagcggagcagcggcggaggtagttgataagcagccccataagttagagaagaaatggacgttttggatcgataatcaatcaaaacctaaacaaggcgctgcttggggcaacaaccttcgcaaggtctacactttcgaaactgtcgaagagttttggtgtttatacgatcaggtgttcaagccaagcaaattaccagcaaatgctgattttcatttgttcaaagctggggttgaacctaaatgggaagatccagagtgtgctagtggggggaaatggacagttactagtagcagaaagcctacccttgaaactatgtggcttgaaacattaatggctttaatcggagagcagtttgatgaagctgatgaaatatgtggtgtggttgctagcgttcgtcaaaggcaggacaaactttctctgtggactaaaaatgcagctaatgaggctgctcagatgagcatcggaagaaagtggaaggaaattatagacgtgacagataagattatctacaacttccatgatgattccaagacaagaacatcaaaaggtcagtacaatgtgtaaagtcatacaatataagtcacttgttagatactatttactaattactatcgtatcttatgttcaattttgaattttgtcatctgttatcatttttccaattctggaagccattcctcanatcatgattaccaacatattaaagctaaacttttcgatgatatatatatatatatatatatagatatgagaaaaaaatattgatcttgatagaaactatgaaaaactaaaagtatgctaagctaagaatccaagtctctcgccgttcttttt

SEQ ID NO: 779 - protein, 192 aa, Lactuca serriola
MASDASGAAAEVVDKQPHKLEKKWTFWIDNQSKPKQGAAWGNNLRKVYTFETVEEFWCLYDQVFKPSKLPANADFHLFKAGVEPKWEDPECASGGKWTVTSSRKPTLETMWLETLMALIGEQFDEADEICGVVASVRQRQDKLSLWTKNAANEAAQMSIGRKWKEIIDVTDKIIYNFHDDSKTRTSKGQYNV

SEQ ID NO: 780 - DNA, 783 bp, Lactuca serriola
ctcaaccccccttctttgagggaagagagaacaatagagagagagagagagaaaagccgggaacaatggcgactgacggcgcggcggtagatgttggcggagaagtggcggagcaaccccataggctagacaagaagtggacattctggttcgataatcaatctaaacctaaacaaggcgccggttgggggaataatcttcgcaacggctacactttcgacaccgtcgaagagttttggtgtctgtatgaccaggtattcaaacctagcaagcttccaggaaatgctgatttccatttgttcaaagctgggattgagcctaaatgggaagatccagagtgtgcaaatggagggaagtggacagttactagtagcagaaaggctaaccttgaaactatgtggtttgaaactttgatggccttaataggtgagcaatttgatgaggctgatgaaatatgtggtgtggttgctagtgtgcgtcaaaggcaggataaactttctttatggactaaaaatgctgctaatgaggctgctcagatgagtattggaagaaagtggaaggaaattatagatgtgactgacaagatcacctacaacttccatgatgattccaagacaagaacatcaaaaggtcgttacagtgtgtaatgacattcctagaacaatttgcagctttttttttaagtcgaattgtgttggccttctacatgttgtatttgatgggatatggtaatcactgttgaggaattttgtttttttattataagaaaatgttgattttcgc

SEQ ID NO: 781 - protein, 193 aa, Lactuca serriola; identical to SEQ ID NO: 777

SEQ ID NO: 782 - DNA, 865 bp, Liriodendron tulipifera
tccttcttcttgcgtgagagggatttgggggatagaaaaatggcagaggtagggctggaatcgacggcagaggcggcagagacggtagagcagaagcaaccgcataggctggagaggaaatggacgttctggtttgataaccagtccaagccaaagcaaggcgccgcctggggttctactcttcgcaaggtctacaccttcgacactgtcgaacagttctggtgtttgtatgaccaaatatttcgacctagcaagttggtggcaaatgctgacttccactgcttcaaagctggaatcgaacccaaatgggaagatccagaatgtgcgaatgggggcaagtggaccgtcacgagtagcagaaagccaaaccttgatgccatgtggcttgaaacgttgatggcccttattggagagcagtttgatgagagtgacgagatctgcggtgttgttgcgagtgtgcgtcaaaggcaggacaagattgcgctgtggactaagacagcaacgaatgaagctgctcagatgagcattgggaggaagtggaaggagatcattgatgtcgctgatcggattacttacagcttccatgatgattcaagaagggaaaaatcagccaggggtggtcgatacagcgtctgagcgatctgctgatcacaacatttcggcctatataataacaaaaactggaggattgagcggtgtcatttggtttgttcatgttctagcatgtcctcatgcaatgcaagtatttccatagtcacacactattataggaattatcagcttgtttttgtacttgttttctttgtaatcgagacatttaagtgctcctgaaatgttatacaagctggagtgcattttgcaggtg

SEQ ID NO: 783 - protein, 198 aa, Liriodendron tulipifera
MAEVGLESTAEAAETVEQKQPHRLERKWTFWFDNQSKPKQGAAWGSTLRKVYTFDTVEQFWCLYDQIFRPSKLVANADFHCFKAGIEPKWEDPECANGGKWTVTSSRKPNLDAMWLETLMALIGEQFDESDEICGVVASVRQRQDKIALWTKTATNEAAQMSIGRKWKEIIDVADRITYSFHDDSRREKSARGGRYSV

SEQ ID NO: 784 - DNA, 618 bp, Medicago truncatula
atggcaacaacagaaccaatcgttgaaggcgctaccgcggcagaggaagtggcggcggttccggtacccgctccggagacagggctaaaacacaaactagagagaagatggactttctggtacgataaccaatccaaacctaaacaaggtgctgcttggggatccactcttcgtaaggtttactcctttgacaccgttgaagagttttggtgcttgcatgatcagatattcaagcccagcaagttgcctagcaatgctgactttcacttgtttaaggatgggattgaaccaaaatgggaagatcccgagtgtgccaatggaggaaagtggactctcaccagcaaatcaaagggcaatcttgataccatgtggctcgaaactttgatggctttgattggcgagcaatttggagacactgaggacatttgcggcgtagttgtgagtgtgcgccagtggcaagacaaactttcattgtggacgaaaacagccgcaaatgagtcgaaccagatgagcattggaaggaagtggaaggaaatcattgatgttagcgacaagatgacatataactttcatgaagatgctaaaacccgaggtgcaaaggctcgatacactgtataa

SEQ ID NO: 785 - protein, 205 aa, Medicago truncatula
MATTEPIVEGATAAEEVAAVPVPAPETGLKHKLERRWTFWYDNQSKPKQGAAWGSTLRKVYSFDTVEEFWCLHDQIFKPSKLPSNADFHLFKDGIEPKWEDPECANGGKWTLTSKSKGNLDTMWLETLMALIGEQFGDTEDICGVVVSVRQWQDKLSLWTKTAANESNQMSIGRKWKEIIDVSDKMTYNFHEDAKTRGAKARYTV

SEQ ID NO: 786 - DNA, 922 bp, Nicotiana tabacum
ctcttccacaattccattacgcctctccgttcgctaaaaatcgacacaaagggaggagaggattttttgaggcaaaaatcaatggccactgaagcaccgatagaggcgacggaggttccgccggcgtcagcgacggagacggtggcgaagcagccacataagctagagaggagatggacattctggttcgataatcaatctaagccgaaacaaggagccgcttggggaagttctcttcgaaaagcttatactttcgaaactgttgaggaattctggagtttatatgatcagatattcaagcccagcaagttgactgctaatgcggactttcatttgttcaaagctgggattgagcccaaatgggaagatcctgagtgtgctagtggtggcaagtggactgttacgagcagcagaaaggctaatcttgagactatgtggcttgaaactctgatggcattggtcggtgagcagtttgatgagtcagaggagatatgtggagtggttgccagtgtacgtcggagtcaggataaactttccttatggactaagactgcctccaatgaagcaattcagatgagcattggtaggaagtggaaggagatcattgatgctgaaaaaatatcctatagtttccatgatgactctaaaagggaaaggtcagctaagagtcgatatactgtgtgaattcctttattgtgtgggattgacactggtccctagattttccaatactgaaaattgtacgattagcacagttttgcgcttgtctgctgcaaaattttgattttctttttaaatttattcgcacttgatatggatctttggatgtattgtgttaaagattttgtttggttctgtgttacttatctggagcctgccccatgtattaatttaacgatgagagttgcagttttcattcctc

SEQ ID NO: 787 - protein, 200 aa, Nicotiana tabacum
MATEAPIEATEVPPASATETVAKQPHKLERRWTFWFDNQSKPKQGAAWGSSLRKAYTFETVEEFWSLYDQIFKPSKLTANADFHLFKAGIEPKWEDPECASGGKWTVTSSRKANLETMWLETLMALVGEQFDESEEICGVVASVRRSQDKLSLWTKTASNEAIQMSIGRKWKEIIDAEKISYSFHDDSKRERSAKSRYTV

SEQ ID NO: 788 - DNA, 856 bp, Ocimum basilicum
gcacgcgtattccctagtccagtccaccccccttcttccgaaacccctttctttcggagatttgatttgctggtaatggcatctgaggtagcagccgctgaaatccccgccgaggcgcccaagcagccccaccaactcgagagaaagtggaccttctggtttgacaatcaatccaaacccaaacagggcgccgcttggggatcttctctgcgcaaggtttatactttcgacaccgtcgaagacttctggtgtttatatgaccagatatttaaacctggcaagttccctgcaaatgctgactttcacttattcagagctggagtggagcccaaatgggaagatcccgagtgtgctaatgggggcaagtggacagtaactagcggcagaaaggagaacttggacaagatgtggcttgaaactttgatggctctaattggagagcagtttgatgaggctgatgagatttgtggagtggttgccagtgtccgtcaaaagcaagataaactctcattgtggaccaagactgcggctaatgaagcagctcagatgggcattgggaggaagtggaaggaggtcatcgatgtcaccgataagatctcctacaattttcatgatgattcgagaagagaaagtagatcagcaagaggtcgatattatgtgtgaagcaagaatccagaattctgtcgaccatcttactgatcgagaacaatgtcattacttgcaagtgaattagccagtgttttgtctatcaatcaatctatctatctgtccgtactgttatattttgaattgatgcgttctgagattattaccttggctaatttcattttattcaaactaccattggtttgagctc

SEQ ID NO: 789 - protein, 195 aa, Ocimum basilicum
MASEVAAAEIPAEAPKQPHQLERKWTFWFDNQSKPKQGAAWGSSLRKVYTFDTVEDFWCLYDQIFKPGKFPANADFHLFRAGVEPKWEDPECANGGKWTVTSGRKENLDKMWLETLMALIGEQFDEADEICGVVASVRQKQDKLSLWTKTAANEAAQMGIGRKWKEVIDVTDKISYNFHDDSRRESRSARGRYYV

SEQ ID NO: 790 - DNA, 810 bp, Populus deltoides
aattcggccattacggccggggggtgtttggtagctggtagctggtagcctggtaatctcatctgaaagatcataagattagtaatggcggcagttacaaatgaagcagcagcagcaagtattgaaggaagtgctacagaagcaatagagaagccgctgccgcataagcttgagagaaaatggaccttttggttcgataaccaatccaaacctaatcaaggcgccgcctggggcacttctctccgcaagatttactcttttgataccgtcgaagaattctggtgtttgtatgagcagatattcaagccaagcaagctgcctggaaatgctgatttccatttatttggagctgggattgaacccaaatgggaagatccagtctgtgctactggaggcaaatggtctgttacctccagcggaaaggccaacttggacaccatgtggcttgaaactttgatggcattgatcggggagcaattcgatgaagctgatgagatttgtggcgtggttgcaagtgtgcgccgccagaggcaggataaacttgctttgtggactaaaactgccgcaaatgaggctgtgcagatgagcattggcaggaagtggaaggaggtcattgatgtcactaataagatcacctacagcttccatgatgattccaagagagaaagaaatgccaaaagccgttacaatgtgtaagcactccatgacggtggtttttttagcttggttccacaccgagaagtgaaatgtatttttgatctgataagtccttaatggatgtatcatgatgatgctcctttaattttggta

SEQ ID NO: 791 - protein, 203 aa, Populus deltoides
MAAVTNEAAAASIEGSATEAIEKPLPHKLERKWTFWFDNQSKPNQGAAWGTSLRKIYSFDTVEEFWCLYEQIFKPSKLPGNADFHLFGAGIEPKWEDPVCATGGKWSVTSSGKANLDTMWLETLMALIGEQFDEADEICGVVASVRRQRQDKLALWTKTAANEAVQMSIGRKWKEVIDVTNKITYSFHDDSKRERNAKSRYNV

SEQ ID NO: 792 - DNA, 731 bp, Populus trichocarpa
atctcaccaggagcagaaaaatcattagtaatggcggcaaatgaagctggtattgaagtaactgcaccgacaacaggagagctggtgaccgagcagccgcagccgcagccgcagccgcagccgcagccgcataaacttgagaggaagtggaccttttggttcgacaatcaatccaaacaaggcgccgcctggggcacttgtctccgcaaggtctactccttcgacaccgtcgaagaattctgtttgtatgaacaggtatttaagccaagcaagctgcctggaaatgctgatttccatttatttaaagatgggattgaacccaaatgggaagatccagtgtgtgctagtggaggcaagtggtctgttacttctagcagaaaggccgacttggataccatgtggcttgaaactttgatggctttgattggggagcaatttgatgaacctgatgatatttgtggcgtggttgcaagcgtgcgtcagaggcaggataaacttgctttgtggactaaagctgctgccaatgaggctgcccagatgagcattggcaggaagtggaaggagatcattgacgtcaatgacaagatcacctacagcttccatgatgattccaaaagggaaagaaatgccaaaagccgatacaatgtgtaagcactccatgactgtcgtgcgatgtgcagtgtggttttgttagcatgtttccacaccaagaagtgaaatgtatttttgat

SEQ ID NO: 793 - protein, 206 aa, Populus trichocarpa
MAANEAGIEVTAPTTGELVTEQPQPQPQPQPQPHKLERKWTFWFDNQSKQGAAWGTCLRKVYSFDTVEEFCLYEQVFKPSKLPGNADFHLFKDGIEPKWEDPVCASGGKWSVTSSRKADLDTMWLETLMALIGEQFDEPDDICGVVASVRQRQDKLALWTKAAANEAAQMSIGRKWKEIIDVNDKITYSFHDDSKRERNAKSRYNV

SEQ ID NO: 794 - DNA, 725 bp, Populus trichocarpa
aatctcatctgaaagatcataagattagtaatggcggcagttgcaaatgaagcagcagcagcagcaagtattgaaggaagcgctacagaaacaatagagaagccgctgccgcataagcttgagagaaaatggaccttttggttcgataaccaatccaaacctaatcaaggcgccgcctggggcacttctctccgcaagatttactcttttgataccgtcgaagaattctggtgtttgtatgagcagatattcaagccaagcaagctgcctgtaaatgctgatttccatttatttagagctgggattgaacccaaatgggaagatccagtctgtgctactggaggcaaatggtctgttacctccagcggaaaggccaacttggacaccatgtggcttgaaactttgatggcattgatcggggagcaattcgatgaagctgatgagatttgtggcgtggttgcaagtgtgcgccgccagaggcaggataaacttgctttgtggactaaaactgccgcaaatgaggctgtgcagatgagcattggcaggaagtggaaggaggtcattgatgtcactaataagatcacctacagcttccatgatgattccaagagagaaagaaatgccaaaagccgttacaatgtgtaagcactccatgacggtggttgtttttagcttggttccacaccgagaagtgaaatgtatttttgatctgatgagtccttaat

SEQ ID NO: 795 - protein, 204 aa, Populus trichocarpa
MAAVANEAAAAASIEGSATETIEKPLPHKLERKWTFWFDNQSKPNQGAAWGTSLRKIYSFDTVEEFWCLYEQIFKPSKLPVNADFHLFRAGIEPKWEDPVCATGGKWSVTSSGKANLDTMWLETLMALIGEQFDEADEICGVVASVRRQRQDKLALWTKTAANEAVQMSIGRKWKEVIDVTNKITYSFHDDSKRERNAKSRYNV

SEQ ID NO: 796 - DNA, 943 bp, Ricinus communis
aaaaaagacccaaactccagacagagcaaagagaaagtaataaaatggcaaccgaaacagcaattgaaggaaccaccgccacagagatcggaactgagaatccggcgccggcgcagcagcacaagctagagaggaagtggacgttttggttcgataaccaatcaaagcccaaacaaggcgccgcctggggtacttctcttcgtaaagtgtacaccttcgataccgttgaagaattttggtgtttgtatgatcagatattcaagccgagtaagctacctgcaagtgctgattttcatttatttaaagctggagttgagcctaaatgggaagatcccgagtgcgctaatggaggcaaatggtctgttacttgtggcaggaaggctcttcttgatactatgtggcttgagactttgatggctttgattggggaacaatttgacgactccgatgagatatgtggtgtggttgcaagtgttcgcccaaggggggataaactcgcattatggacaaggacagcaacaaatgaggctgcccagatgggcgtcggcaagaagtggaaggagatcattgatgtcactgataagatcacttacagcttccatgatgattctaggagggaaagatctgtgaaaagccgatacaatgtatgagcactccactacttttgcagtatggctattgagaacaccaaaacttttaagagtatttcacgggcgaacttctggatgaatgtattcgaatgcttcacaattttgttatttgacaattatctacatttactgaagtactgtagcatctggcaatatgtacgagggagatggaaagaaagggagaggggcagagattgttgtccgtaatacatggtcttagaagaaaattcctttttttcatttgaagtaattatatttatgactccagcaactctagttttggaaacataatg

SEQ ID NO: 797 - protein, 201 aa, Ricinus communis
MATETAIEGTTATEIGTENPAPAQQHKLERKWTFWFDNQSKPKQGAAWGTSLRKVYTFDTVEEFWCLYDQIFKPSKLPASADFHLFKAGVEPKWEDPECANGGKWSVTCGRKALLDTMWLETLMALIGEQFDDSDEICGVVASVRPRGDKLALWTRTATNEAAQMGVGKKWKEIIDVTDKITYSFHDDSRRERSVKSRYNV

SEQ ID NO: 798 - DNA, 1006 bp, Sorghum bicolor
gccttccccgttcttccccttcacgtctcttcgacagccgcaaacctctctccctcgtctggtatcgtctctcccacacccaaaaaaaaccctcgaaaagcggcggcggcgcgacatggcggaggtcgaggttccagctgctgcggtcgcgacgacgatccctgaggcggcggaggctaccgagggcggagccgctgcggaggcgaagggtccgcacaagctgcacaggcagtggaccttctggtacgacatccagtcgaagcccaagcccggcgctgcgtggggcacctccctcaaaaaggcctacaccttcgacaccgtcgaggagttttggagcttgtatgatcagatttttcgtccaagcaagttgtctgggaatgctgattttcatctgttcaaggctggagtagagccaaaatgggaagacccagagtgtgcaaatggtggcaaatggactgtcccatgcaacagaaaggcaacctttgagaacatgtggcttgaaacgttgatggctcttattggggagcagtttgatgaaacagaggacatttgtggaattgttgctagtgtccgtgcaagaggagataagctcgcattatggactaggactgccagcaacgaagctgtccaggtgaacattggcaagaaatggaaggatgtcatcgactacaatgacaagatcacctacactttccatgacgactccagaagagagaagccgagcaggggcggacggtacaccgtgtaagctgcacatcaacaaggttgcttggactggatagcgggcggagtggaattttctgctgagatcagcaccaactttcatttgataagccttggcttacctgaggcaattttcgcacctattgtgatgttattttgctttcagatagcttatgtagtacaagaaagagaggttggagacattgacgattttgtatgcaactgaatttctatctgaatctgccccgattcaactgcacccaaacgagtcattgcgttctgg

SEQ ID NO: 799 - protein, 210 aa, Sorghum bicolor
MAEVEVPAAAVATTIPEAAEATEGGAAAEAKGPHKLHRQWTFWYDIQSKPKPGAAWGTSLKKAYTFDTVEEFWSLYDQIFRPSKLSGNADFHLFKAGVEPKWEDPECANGGKWTVPCNRKATFENMWLETLMALIGEQFDETEDICGIVASVRARGDKLALWTRTASNEAVQVNIGKKWKDVIDYNDKITYTFHDDSRREKPSRGGRYTV

SEQ ID NO: 800 - DNA, 915 bp, Solanum lycopersicum
atcggccgaattgaattcctttacgcctctccgtcgtgaaaaagctatacaaaaggagaggattttgacgggaaaacaatggccaccgaagcaccggtagaggcgacggagattccgtcggtagcggcagcggagactgtggagaagcagccgcataagctagagaggaagtggacgttctggttcgataaccagtctaaaccgaaacaaggcgtcgcttggggaagttctcttcgaaaagcttatacttttgaaactgttgaggaattctggagtttatatgatcaaatattcaagcccagcaaggttactgttaatgcggactttcatttgttcaaagctgggattgagcccaaatgggaagatcctgagtgtgccaatggtggcaagtggactgctactagcagcagaaaggctaatctcgagactatgtggctagaaacactgatggcattggtcggcgagcaatttgatgagtcagaagatatatgtggggtggttgctagtgtgcgtaggagtcaggataaactttccttgtggactaagacagccaccaatgaagcagctcagatgggcattggtaggaagtggaaggagatcattgatgccgaaaagatatcctatagtttccatgatgattctaaaagagagaggtcagctaagagccgatatactgtgtgaaatttctttatcgtgtggaattaacaccactccttaagctctttaccaatactgaaattgtacgattagcacttttttgcgcttgtctgctgcaaattttgatcttattgaaatttattcgaacttgatgtatgtttggatgtattgcattaaagattttgttctgatgtttggtaattatgtggtatcactttatatctcaagtagactctatgggagaaagcttagtcgatt

SEQ ID NO: 801 - protein, 200 aa, Solanum lycopersicum
MATEAPVEATEIPSVAAAETVEKQPHKLERKWTFWFDNQSKPKQGVAWGSSLRKAYTFETVEEFWSLYDQIFKPSKVTVNADFHLFKAGIEPKWEDPECANGGKWTATSSRKANLETMWLETLMALVGEQFDESEDICGVVASVRRSQDKLSLWTKTATNEAAQMGIGRKWKEIIDAEKISYSFHDDSKRERSAKSRYTV

SEQ ID NO: 802 - DNA, 735 bp, Salvia miltiorrhiza
gcacgagggtgattgatttggtcgaatggcatctgaggtggcggctgcaataccagaactcccggccgaggcgccgcccgcggcggagaagcagccacacaagctcgagaggaagtggacattttggttcgacaaccaatccaagcccaagcagggcggcgccgcctggggctcttctcttcgcaagggatatactttcgacaccgtcgaagaattctggtgtttatatgatcagatatttagacccagcaagttccctgcaaatgctgattttcacttattcaaagctggagtggagccaaaatgggaagaccccgagtgtgctaatgggggcaagtggactgtgactagcaacaaaaagtctgatctggacaacatgtggctgcaaactttaatggctctaattggagagcagtttgatgatgccgatgagatatgtggagtggttgccagtgtgcgccaaaaacaagataaactctcattatggaccaagactgcggccaatgaagcagctcagatgggcattggacggaagtggaaggaggtgattgatatcactgacaagatctcctatggctttcatgatgattcgagaagagaaagtagagcgccaagaagtcgatatcaagtgtgaagcaagagcctatgatgttgtcgaagcatgcttctgattgagttcccaaacctatcttctcttcctagtgaattactggtgttttgtctctcggtctatct

SEQ ID NO: 803 - protein, 202 aa, Salvia miltiorrhiza
MASEVAAAIPELPAEAPPAAEKQPHKLERKWTFWFDNQSKPKQGGAAWGSSLRKGYTFDTVEEFWCLYDQIFRPSKFPANADFHLFKAGVEPKWEDPECANGGKWTVTSNKKSDLDNMWLQTLMALIGEQFDDADEICGVVASVRQKQDKLSLWTKTAANEAAQMGIGRKWKEVIDITDKISYGFHDDSRRESRAPRSRYQV

SEQ ID NO: 804 - DNA, 804 bp, Saccharum officinarum
  misc_feature (795)..(795): n is a, c, g, or t
ccttctcccttcttcgccttcacgtctcttcgacagccacaaacctctctccctcgtctggtatcgtctctcccacacccaaaaaaaaccctcgaaaagcggcggcggcgcgacatggcggaggtcgaggttccggctgctgcggtcgcgacgacgacccctgaggcggcggcgaccgagggcggagccgcgacggaggcgaagggtccgcacaagctgcaccggcagtggaccttctggtacgacatccagtcgaagcccaagccgggcgctgcgtggggcacctccctcaaaaaggcctacaccttcgacaccgtcgaggatttttggagcttgtatgatcagatttttcgtccaagcaagctgtctgggaatgctgattttcatctgttcaaggctggagtagagccaaaatgggaagacccagagtgtgcaaatggtggcaaatggactgtcccatgcaacagaaaggcaacctttgagaacatgtggcttgaaacgttgatggcacttattggggagcagtttgatgaaacagaggacatttgtggaattgttgctagtgtccgtgcgagaggagataagcttgcattatggactaggactgccagcaatgaagctgtccaggtaaacattggcaagaaatggaaggatgtcatcgactacaatgacaagatcacctacactttccatgacgactcgagaagagagaagccgagcagaggcggacggtacaccgtgtaagctgcacatcaacaagggtcgtgcttggactggaaagcgggggagtggaantttctgctg

SEQ ID NO: 805 - protein, 209 aa, Saccharum officinarum
MAEVEVPAAAVATTTPEAAATEGGAATEAKGPHKLHRQWTFWYDIQSKPKPGAAWGTSLKKAYTFDTVEDFWSLYDQIFRPSKLSGNADFHLFKAGVEPKWEDPECANGGKWTVPCNRKATFENMWLETLMALIGEQFDETEDICGIVASVRARGDKLALWTRTASNEAVQVNIGKKWKDVIDYNDKITYTFHDDSRREKPSRGGRYTV

SEQ ID NO: 806 - DNA, 931 bp, Solanum tuberosum
aaagctaacacaaaggagaggattttgacggaaaaactatggccaccgaagcaccggtagaggcgacggagattccgccggtcgcggcggcggcggcggagtcggtggagaagcagccgcataagctagagaggaagtggacgttctggttcgataaccagtctaaaccgaaacaaggcgccgcttggggaagttctcttcgaaaagcttatacttttgaaactgttgaggaattctggagtttatacgatcagatattcaagcccagcaagttgactgttaatgcggactttcatttgttcaaagctgggattgagcccaaatgggaagatcctgagtgtgccaatggtggcaagtggactgctacgagcagcagaaaggctaatctcgagactatgtggcttgaaacactgatggcattggtcggcgagcaatttgatgagtcagaagatatatgtggagtggttgctagtgtgcgtaggagtcaggataaactttccttgtggactaagactgccaccaatgaagcagctcagatgggcattggtaggaagtggaaggagatcattgataccgaaaagatatcctatagtttccatgatgattctaaaagggagaggtcagctaagagccgatatactgtgtgaatttctttatcgtgtgggattaacaccattccttaagctctaccaatactgaaattgctaggcaacgtgagctgcacacacttaaaggtcacgtggaatcagtggtgaagttgaagggtcttgacatagagacaattcagcaatcatacactgtttgatgggagagcaagtttgactagtgctattttaccggtgagtgggtgatagaatgaagacataatgagtgtgtgagttacctctggagcgacaagttcatagtagtaatgtcttcagcgtttaaaagt

SEQ ID NO: 807 - protein, 202 aa, Solanum tuberosum
MATEAPVEATEIPPVAAAAAESVEKQPHKLERKWTFWFDNQSKPKQGAAWGSSLRKAYTFETVEEFWSLYDQIFKPSKLTVNADFHLFKAGIEPKWEDPECANGGKWTATSSRKANLETMWLETLMALVGEQFDESEDICGVVASVRRSQDKLSLWTKTATNEAAQMGIGRKWKEIIDTEKISYSFHDDSKRERSAKSRYTV

SEQ ID NO: 808 - DNA, 1114 bp, Triticum aestivum
cttcggcggctgctcctctctctctctctctctctctctctcgctgcggctcatcctccccatcccaaaaccctcggaaagcaaaggcggcggcgcgacatggcagaggtcgaagctgcgctcccggtggcggcgacagagaccccggaggtcgcggccgagagcgacgccggtgcggccgaggcgaaggggccgcacaagctgcagcggcagtggaccttctggtacgacatccagaccaagcccaagcccggcgccgcctggggcacctcgctcaaaaagggctacaccttcgacaccgtcgaagagttctggtgcttgtatgatcagattttccgtccgagtaagctggtaggaagtgctgattttcatttattcaaggctggggtagaaccaaagtgggaagatccagagtgtgcaaatgggggcaaatggactgtgatatctagcaggaaggccaatcttgataccatgtggcttgaaacgtgtatggctctgattggagagcagttcgatgagagccaggaaatttgtggtgttgtcgctagtgttcgccagagacaggataagctttcattatggactaagactgccagtaacgaagctgttcaggtggacattggcaagaaatggaaggaggttattgactacaatgataagatggtctacagcttccacgatgactcgagaagtcagaaaccaagcagaggtggacgatacaccgtgtaaggctgcacgcatgatgaagaccgcagctcagaaagtggccttgtagtgtttgaccgagattcgaaccgcctcagctaatgttgtttgaggcaattttccaatctattattatgtcgttttgctctctgatagcttgtggtatacagagatgttgtatgcactcatttttcctcgcaatatcccttgattacaacaacccagaggaggaactccatctcgtgtgggaagtgggatgcatcatcactgttttaagtatatgtttgcctttgtgcaagacttggtattggctgtttagtccacttttgtgggctttgaaaagcttgcatggaaaaaaagatgagttttgtggttcttaatagatgggactaatgttttgtggttccat

SEQ ID NO: 809 - protein, 209 aa, Triticum aestivum
MAEVEAALPVAATETPEVAAESDAGAAEAKGPHKLQRQWTFWYDIQTKPKPGAAWGTSLKKGYTFDTVEEFWCLYDQIFRPSKLVGSADFHLFKAGVEPKWEDPECANGGKWTVISSRKANLDTMWLETCMALIGEQFDESQEICGVVASVRQRQDKLSLWTKTASNEAVQVDIGKKWKEVIDYNDKMVYSFHDDSRSQKPSRGGRYTV

SEQ ID NO: 810 - DNA, 705 bp, Taraxacum kok-saghyz
gagagagaaaaccgggaataatggcgagtgacggcgcagcggtggatgttagcgtagaagcggcggaacagccccataggttagataagaagtggacgttttggtttgataatcaatctaaacctaaacaaggcgccggttgggggaataatcttcgtaacgcgtacacattcgatacagttgaagagttttggtgtttgtatgatcaggtattcaagcctagcaagctgccaggaaatgctgatttccatttgttcaaagctggtgttgagcctaaatgggaagatcccgaatgtgccaatggtgggaagtggacagttactagtagcagaaaggctaaccttgaaactatgtggtttgaaactttgatggccttaattggtgagcaatttgaagaggctgatgaaatatgtggtgtggttgctagtgtgcgccaaaggcaggacaaactttctttatggactaaaaatgctgctaatgaggctgctcagatgagtattggaagaaagtggaaggaaatcatagatgtgactgacaaaattacctacaacttccatgatgactcgaagacaagaacatcaaaaggtcgttatagtgtgtaatgagacattctgttgacaaatactagaagaatttgcagccttttttttgtctactaaaaaccaaattggaattgtgttcggacgtttacatgttgtatttgat

SEQ ID NO: 811 - protein, 193 aa, Taraxacum kok-saghyz
MASDGAAVDVSVEAAEQPHRLDKKWTFWFDNQSKPKQGAGWGNNLRNAYTFDTVEEFWCLYDQVFKPSKLPGNADFHLFKAGVEPKWEDPECANGGKWTVTSSRKANLETMWFETLMALIGEQFEEADEICGVVASVRQRQDKLSLWTKNAANEAAQMSIGRKWKEIIDVTDKITYNFHDDSKTRTSKGRYSV

SEQ ID NO: 812 - DNA, 724 bp, Vitis vinifera
cgagtgaggcggcagggatggagagcggcgcagcagggatggagagcggcgcagcaccaacggaggcggccaagcagccacacaggctggagaggaagtggaccttctggttcgataaccagtccaagcccaagcaaggcgcggcttgggggacctctcttcgcaaggcttacaccttcgaaaccgtcgaagaattttggtgtctgtatgatcagatatttaagcccagcaagttgccagccaatgcagatttccatttgttcaaagctggggttgaaccaaaatgggaagatcctgagtgtgcaaatggaggcaaatggactgttgccagcagccgaaagggtaaccttgataccatgtggctagaaacgttgatggccttaattggggagcaatttgatgaggctgatgaaatatgtggtgtggttgcaagtgtacgtcaaaggcaggataagcttgctctgtggactaagacagcaaccaacgaggctgctcagatgagcattggaaggaagtggaaggaggtcattgatgtcactgataagatcacttacagctttcatgatgattccagaagggaaagatcagtcaaagttcgatacaacgtgtgagcccgtgttgggtattttggtgatgtgaatttagcttctagaggaaataggattgggacgaacgactaagaggctttacagtggtgtttgttgtgtttttaattccacaccat

SEQ ID NO: 813 - protein, 197 aa, Vitis vinifera
MESGAAGMESGAAPTEAAKQPHRLERKWTFWFDNQSKPKQGAAWGTSLRKAYTFETVEEFWCLYDQIFKPSKLPANADFHLFKAGVEPKWEDPECANGGKWTVASSRKGNLDTMWLETLMALIGEQFDEADEICGVVASVRQRQDKLALWTKTATNEAAQMSIGRKWKEVIDVTDKITYSFHDDSRRERSVKVRYNV

SEQ ID NO: 814 - DNA, 827 bp, Zea mays
gcgtctcttccacagccgcaacctctatccctcgtctggtatcgtctcccacacccctctgccccaactcagaaaaaccctcgaaaagcggcggcggcgcgacatggcggaggtcgaggctccagctgctgcggttgcggcggcgacccctgaggtggcgacggtgaccgagggcggagccgctacggaggcgaagggtccgcacaagctgcaccgccagtggaccttctggtacgacatccagtccaagcccaaacccggcgctgcgtggggcacctccctcaaaaaggcgtacaccttcgacaccgtcgaggagttttggggcttgtatgatcatgttttccgtccaagcaagttgcctgggactgctgattttcacctattcaaggctggagtagagccaaaatgggaagacccagagtgtgcaaatggtggcaaatggactgtcccatgcaacagaaagccaacctttgagaccatgtggcttgaaacgttgatggctcttgttggggagcagtttgatgaaacagatgacatttgtggaattgttgctagtgtccgtccaagaggagataagcttgcattgtggactaggactgccagcaatgaagctgtccaggtaaacattggcaagaaatggaaggatgtcatcgactacaatgacaagatcatctacactttccatgacgactcgagaagggataagccaagcagaggtggacggtacaccgtgtaagttgcacacgaagaaggtccgtgtcgttcggactggacagagggtgagagtggagttttgtgctgagatccgcaccacctttcatttaata

SEQ ID NO: 815 - protein, 210 aa, Zea mays
MAEVEAPAAAVAAATPEVATVTEGGAATEAKGPHKLHRQWTFWYDIQSKPKPGAAWGTSLKKAYTFDTVEEFWGLYDHVFRPSKLPGTADFHLFKAGVEPKWEDPECANGGKWTVPCNRKPTFETMWLETLMALVGEQFDETDDICGIVASVRPRGDKLALWTRTASNEAVQVNIGKKWKDVIDYNDKIIYTFHDDSRRDKPSRGGRYTV

SEQ ID NO: 816 - DNA, 1163 bp, Zea mays
cgtatcttcgtccgccgcaacccttcacgtatcgtctctctctcacacggtcacaccctgacctcccccctccccctcccagaaaagacccctcgaaaaacggcggcgctgcgacatggcggaggtcgaggctccagctactgcggtcgaggctccagctgctgcggtcgcgacgacgacccctgaggtggcggcgcccgaggccggagccgctacggaggcgaagggtccgcacaagcttcaccggcagtggaccttctggtacgacatccagacgaagaccaagtccggggctgcgtggggcacctccctcaaaaaggcctacaccttcgacaccgttgaggagttctggagcatgtatgatcagatttttcgtccaagcaagttgtctgggaatgctgattttcatctattcaaggctggagtagagccaaaatgggaagacccagagtgtgcaaatggtggcaaatggactgtcccatgcaacagaaaggcaacctttgagaccatgtggcttgaaacgttgatggctcttattggggagcagtttgatgaaacagaggacatttgtggaattgttgctagtgtccgtgcaagaggagataagctggcattatggactaggactgccagcaatgaagctgtccaggtaaacattggcaagaagtggaaggatgtcatcgactacaacgacaagatcacgtacactttccatgacgactctaagagagacaagcccagcagaggtgggcggtacaccgtgtaagctggacgtcaagaaggccgttgctttggattggaagtggagagcggaggtggggattttcttctgggatcgtcgccgactttcgtttgattcagcttttacacgaggcagttttcgccgctattacaatgttattttcctctcagacagcttatgtggtacaagaaagagacgttggagacattgacggtttctgtatggcactagatttctatcttaatatggcccccccggttcagtagcaaccccaacgagtcatttgctttttggagatccctgcaatgcatggccatgttttagatcttatatatattgtactgtatataaaacgtttgtgatctgtggagccattggccccttgcatgcaaatgtgccctgtcggtaaggtttggcattt

SEQ ID NO: 817 - protein, 216 aa, Zea mays
MAEVEAPATAVEAPAAAVATTTPEVAAPEAGAATEAKGPHKLHRQWTFWYDIQTKTKSGAAWGTSLKKAYTFDTVEEFWSMYDQIFRPSKLSGNADFHLFKAGVEPKWEDPECANGGKWTVPCNRKATFETMWLETLMALIGEQFDETEDICGIVASVRARGDKLALWTRTASNEAVQVNIGKKWKDVIDYNDKITYTFHDDSKRDKPSRGGRYTV

SEQ ID NO: 818 - DNA, 2194 bp, Oryza sativa; identical to SEQ ID NO: 95

SEQ ID NO: 819 - DNA, 654 bp, Oryza sativa
cttctacatcggcttaggtgtagcaacacgactttattattattattattattattattattattttacaaaaatataaaatagatcagtccctcaccacaagtagagcaagttggtgagttattgtaaagttctacaaagctaatttaaaagttattgcattaacttatttcatattacaaacaagagtgtcaatggaacaatgaaaaccatatgacatactataattttgtttttattattgaaattatataattcaaagagaataaatccacatagccgtaaagttctacatgtggtgcattaccaaaatatatatagcttacaaaacatgacaagcttagtttgaaaaattgcaatccttatcacattgacacataaagtgagtgatgagtcataatattatttttcttgctacccatcatgtatatatgatagccacaaagttactttgatgatgatatcaaagaacatttttaggtgcacctaacagaatatccaaataatatgactcacttagatcataatagagcatcaagtaaaactaacactctaaagcaaccgatgggaaagcatctataaatagacaagcacaatgaaaatcctcatcatccttcaccacaattcaaatattatagttgaagcatagtagta

SEQ ID NO: 820 - DNA, 53 bp, Artificial sequence
  primer: prm09303
ggggacaagtttgtacaaaaaagcaggcttaaacaatggagaaggatcaccag

SEQ ID NO: 821 - DNA, 50 bp, Artificial sequence
  primer: prm09304
ggggaccactttgtacaagaaagctgggtttatttcagaagtttgttgca

SEQ ID NO: 822 - DNA, 50 bp, Artificial sequence
  primer: prm08276
ggggacaagtttgtacaaaaaagcaggcttaaacaatggcgggaatggca

SEQ ID NO: 823 - DNA, 50 bp, Artificial sequence
  primer: prm08277
ggggaccactttgtacaagaaagctgggttcaggccccttaacataactc

SEQ ID NO: 824 - DNA, 52 bp, Artificial sequence
  primer: prm08278
ggggacaagtttgtacaaaaaagcaggcttaaacaatggcaggaatggcacc

SEQ ID NO: 825 - DNA, 54 bp, Artificial sequence
  primer: prm08279
ggggaccactttgtacaagaaagctgggtaagacataatctagagaaggtcagc

SEQ ID NO: 826 - DNA, 777 bp, Oryza sativa
atggcgttggctaataagattggtaatctgctcaagagagccacgagctcaagtccagctctctatcaatcaatcagatgcatgtcatcctcaaagctttttgttggaggcctttcgtacggcacagatgagcagagcctcagagatacttttgccaattatggtcaagttattgaagctaagatcatcaatgaccgtgaaactgggaggtctagaggttttggcttcataacttacgcatcaagtgaagaggcttcagctgcaatcacagccttggatggaaaggatctcgatgggcgtaacatcagggttaacactgccaatgagagaactggtggcttccgtagtgggggtggtggctatggaggcggtggctatggcggcggcggtggcggctatggtggtggtggctacagtggtggtggtggctatggcggtggtggctacagtggtggtggtggtggcggcggcggctaccaaggaggcggcggtggttatggtggcaacaatggagggtatggcaacaggggtggtggtggaggtggttatggagttgcagaaggatctgcagatgccttctctggaatcaacttaggtggtgatggtagttttggtggaaacccagctggaagctttggtgatgctggaggttccactggcggtggtgatttctccggtgccggtggtgacagctttggaagccgcaagaacgatgagctcatggatgacctcttcaaggatgacgagcctgacaactatgccaacaagcagggctaa

SEQ ID NO: 827 - protein, 258 aa, Oryza sativa
MALANKIGNLLKRATSSSPALYQSIRCMSSSKLFVGGLSYGTDEQSLRDTFANYGQVIEAKIINDRETGRSRGFGFITYASSEEASAAITALDGKDLDGRNIRVNTANERTGGFRSGGGGYGGGGYGGGGGGYGGGGYSGGGGYGGGGYSGGGGGGGGYQGGGGGYGGNNGGYGNRGGGGGGYGVAEGSADAFSGINLGGDGSFGGNPAGSFGDAGGSTGGGDFSGAGGDSFGSRKNDELMDDLFKDDEPDNYANKQG

SEQ ID NO: 828 - protein, 5 aa, Artificial sequence
  signature sequence 1
GGYGG

SEQ ID NO: 829 - protein, 4 aa, Artificial sequence
  signature sequence 2
GGYG

SEQ ID NO: 830 - protein, 6 aa, Artificial sequence
  signature sequence 3
  VARIANT (1)..(1): / replace = "Ile" / replace = "Val"
  VARIANT (2)..(2): / replace = "Tyr"
  VARIANT (3)..(3): / replace = "Val"
  VARIANT (6)..(6): / replace = "Ile" / replace = "Met" / replace = "Val"
LFIGGL

SEQ ID NO: 831 - protein, 8 aa, Artificial sequence
  signature sequence 4
  VARIANT (4)..(4): / replace = "Ala"
  VARIANT (6)..(6): / replace = "Val"
  VARIANT (7)..(7): / replace = "Asp" / replace = "His" / replace = "Thr" / replace = "Asn"
  VARIANT (8)..(8): / replace = "Tyr"
RGFGFISF

SEQ ID NO: 832 - protein, 50 aa, Artificial sequence
  motif 1
  VARIANT (2)..(2): / replace = "Thr"
  VARIANT (6)..(6): / replace = "Ile"
  VARIANT (10)..(10): / replace = "Ala"
  VARIANT (11)..(11): / replace = "Tyr"
  VARIANT (16)..(16): / replace = "His"
  VARIANT (19)..(19): / replace = "Lys"
  VARIANT (20)..(20): / replace = "Asp"
  VARIANT (23)..(23): / replace = "Ala"
  VARIANT (25)..(25): / replace = "Tyr"
  VARIANT (27)..(27): / replace = "Asp"
  VARIANT (29)..(29): / replace = "Thr"
  VARIANT (30)..(30): / replace = "Asp"
  VARIANT (32)..(32): / replace = "Lys"
  VARIANT (33)..(33): / replace = "Ile"
  VARIANT (35)..(35): / replace = "Val"
  VARIANT (38)..(38): / replace = "Asp"
  VARIANT (39)..(39): / replace = "Ser"
  VARIANT (49)..(49): / replace = "Asn" / replace = "Ser"
  VARIANT (50)..(50): / replace = "Tyr"
SSKLFVGGLSWGTDDQSLREAFSSFGEVVEARVITDRETGRSRGFGFVTF

SEQ ID NO: 833 - protein, 50 aa, Artificial sequence
  motif 2
  VARIANT (2)..(2): / replace = "Thr"
  VARIANT (6)..(6): / replace = "Ile"
  VARIANT (10)..(10): / replace = "Ala"
  VARIANT (11)..(11): / replace = "Tyr"
  VARIANT (16)..(16): / replace = "His"
  VARIANT (19)..(19): / replace = "Lys"
  VARIANT (20)..(20): / replace = "Asp"
  VARIANT (23)..(23): / replace = "Ser"
  VARIANT (24)..(24): / replace = "Lys"
  VARIANT (25)..(25): / replace = "Tyr"
  VARIANT (27)..(27): / replace = "Asp"
  VARIANT (29)..(29): / replace = "Thr" / replace = "Ile"
  VARIANT (30)..(30): / replace = "Asp"
  VARIANT (32)..(32): / replace = "Lys"
  VARIANT (33)..(33): / replace = "Ile"
  VARIANT (35)..(35): / replace = "Val"
  VARIANT (38)..(38): / replace = "Asp"
  VARIANT (49)..(49): / replace = "Asn" / replace = "Ser"
  VARIANT (50)..(50): / replace = "Tyr"
SSKLFVGGLSWGTDDQSLREAFASFGEVVEARVITDRETGRSRGFGFVTF

SEQ ID NO: 834 - protein, 21 aa, Artificial sequence
  motif 3
  VARIANT (1)..(1): / replace = "Leu"
  VARIANT (4)..(4): / replace = "Gln"
  VARIANT (5)..(5): / replace = "Asp"
  VARIANT (7)..(7): / replace = "Asn"
  VARIANT (11)..(11): / replace = "Val"
  VARIANT (14)..(14): / replace = "Ser"
  VARIANT (18)..(18): / replace = "Asp"
  VARIANT (21)..(21): / replace = "Ser"
MDGKELDGRNIRVNYANERPS

SEQ ID NO: 835 - protein, 29 aa, Artificial sequence
  motif 4
  VARIANT (1)..(1): / replace = "Glu"
  VARIANT (3)..(3): / replace = "Asp" / replace = "Ala"
  VARIANT (5)..(5): / replace = "Ser"
  VARIANT (6)..(6): / replace = "Ser"
  VARIANT (14)..(14): / replace = "Gln"
  VARIANT (15)..(15): / replace = "Asp"
  VARIANT (21)..(21): / replace = "Val"
  VARIANT (24)..(24): / replace = "Ser"
  VARIANT (27)..(27): / replace = "Thr"
  VARIANT (28)..(28): / replace = "Asp"
SEEAKAAISAMDGKELNGRNIRVNYANER

SEQ ID NO: 836 - protein, 15 aa, Artificial sequence
  motif 5
  VARIANT (3)..(3): / replace = "Phe"
  VARIANT (9)..(9): / replace = "Gly"
  VARIANT (10)..(10): / replace = "Ala"
MAFLNKLGSLLRQSA

SEQ ID NO: 837 - protein, 21 aa, Artificial sequence
  motif 6
  VARIANT (3)..(3): / replace = "Ala"
  VARIANT (4)..(4): / replace = "Cys" / replace = "Phe"
  VARIANT (9)..(9): / replace = "Gly" / replace = "Asn"
  VARIANT (18)..(18): / replace = "Asn"
MAFLNKLGSLLRQSASSSSAS

SEQ ID NO: 838 - DNA, 56 bp, Artificial sequence
  primer: prm10480
ggggacaagtttgtacaaaaaagcaggcttaaacaatggcgttggctaataagatt

SEQ ID NO: 839 - DNA, 50 bp, Artificial sequence
  primer: prm10481
ggggaccactttgtacaagaaagctgggtaggctcgaaggacgtagatta

SEQ ID NO: 840 - DNA, 2194 bp, Oryza sativa; identical to SEQ ID NO: 95

SEQ ID NO: 841 - DNA, 462 bp, Arabidopsis thaliana
atggctttctgtaacaaactcggtggtctattgagacagaacatttcttctaacggaaatgttccggttacgtctatgctcggatctctccggttgatgtctaccaagcttttcatcggaggtctctcatggggaaccgatgacgcatccttaagggatgcttttgctcacttcggtgacgttgttgatgctaaagttatcgttgatagagagacaggaagatcaagggggtttggatttgtcaacttcaatgatgagggtgctgcaactgctgccatatcagagatggacggaaaggaactgaatggtcgtcacatccgagtgaatcctgctaatgatagaccaagtgctccacgggcttatggaggtggtggtggatacagctacggaggaggtggtggtgggtacggaggaggaggtggtggctatggaggaggtggtgatggtggtggtggtttctaa

SEQ ID NO: 842 - DNA, 435 bp, Arabidopsis thaliana
atggctttctgtaacaaactcggtggtctattgagacagaacatttcttctaacggaaatgttccggttacgtctatgctcggatctctccggttgatgtctaccaagcttttcatcggaggtctctcatggggaaccgatgacgcatccttaagggatgcttttgctcacttcggtgacgttgttgatgctaaagttatcgttgatagagagacaggaagatcaagggggtttggatttgtcaacttcaatgatgagggtgctgcaactgctgccatatcagagatggacggaaaggaactgaatggtcgtcacatccgagtgaatcctgctaatgatagaccaagtgctccacgggcttatggaggtggtggtggatacagtggaggaggtggtggctatggaggaggtggtgatggtggtggtggtttctaa

SEQ ID NO: 843 - DNA, 390 bp, Arabidopsis thaliana
atggctttctgtaacaaactcggtggtctattgagacagaacatttcttctaacggaaatgttccggttacgtctatgctcggatctctccggttgatgtctaccaagcttttcatcggaggtctctcatggggaaccgatgacgcatccttaagggatgcttttgctcacttcggtgacgttgttgatgctaaagttatcgttgatagagagacaggaagatcaagggggtttggatttgtcaacttcaatgatgagggtgctgcaactgctgccatatcagagatggacggaaaggaactgaatggtcgtcacatccgagtgaatcctgctaatgatagaccaagtggtggctatggaggaggtggtgatggtggtggtggtttctaa

SEQ ID NO: 844 - DNA, 453 bp, Arabidopsis thaliana
atggctttctgtaacaaactcggtggtctattgagacaaaacatttcttctaacggaaatgttccggttacgtctatgctcggatctctccggttgatgtctaccaagcttttcatcggaggtctctcatggggaaccgatgacgcatccttaagggatgcttttgctcacttcggtgacgttgttgatgctaaagttatcgttgatagagagacaggaagatcaagggggtttggatttgtcaacttcaatgatgagggcgctgcaactgctgccatatcagagatggacggaaaggaactgaatggtcgtcacatccgagtgaatcctgctaatgatagaccaagtgctccacgggcttatggaggcggtggtggatacagcggaggaggtggtggtggctatggaggaggaggtggcagctacggtggtggtgatggtggtggttactaa

SEQ ID NO: 845 - DNA, 411 bp, Arabidopsis thaliana
atggctttctgcaacaaacttagcggtatcttgagacaaggggtttctcagagctcaaatggtccagttacatctatgcttggctctcttcgttacatgtcctctaagctttttgttggtggtctctcttggggaactgatgacagctccttaaagcaagctttcactagctttggtgaagtcacagaagcaacggtgattgcagacagagagacagggaggtcgaggggattcggatttgttagcttcagctgtgaggattctgctaacaatgccataaaagaaatggatggaaaggagctgaatggtaggcaaatccgtgtgaatcttgcaaccgaaagatcgagtgccccgagatcatcatttggtggtggtggcggttacggtggtggcggtggtggtggctactaa

SEQ ID NO: 846 - DNA, 477 bp, Arabidopsis thaliana
atggctttctgtaacaaactcggtggtctattgagacagaacatttcttctaacggaaatgttccggttacgtctatgctcggatctctccggttgatgtctaccaagcttttcatcggaggtctctcatggggaaccgatgacgcatccttaagggatgcttttgctcacttcggtgacgttgttgatgctaaagttatcgttgatagagagacaggaagatcaagggggtttggatttgtcaacttcaatgatgagggtgctgcaactgctgccatatcagagatggacggaaaggaactgaatggtcgtcacatccgagtgaatcctgctaatgatagaccaagtgctccacgggcttatggaggtggtggtggatacagtggtggaggtggaggctacggaggaggtggtggtgggtacggaggaggaggtggtggctatggaggaggtggtgatggtggtggtggtttctaa

SEQ ID NO: 847 - DNA, 870 bp, Arabidopsis thaliana
atggctttcttaagtaaagttggaaggttattcagtcagaccagcagccatgtcactgcctctagctcgatgctacagagcatccgttgcatgtcttcatcaaaaatctttgttggaggtatctcctacagcactgatgagtttggcttaagagaagcttttagcaaatatggagaagttgttgatgcaaagattattgtggaccgtgaaacaggcagatctaggggctttgctttcgtaacatttacttcgactgaggaggctagtaatgccatgcaattggatggacaggaccttcatggtcgaagaattagggtgaattatgcaactgaaagaggaagtgggtttggaggaaggggattcggtggtcctggtggtggttatggtgcttcagatggtggttatggtgctccagctggtggttatggaggtggtgccggtggttacggaggcaactcttcttatagtggaaatgctgggggtggtggtggttatggtggtaactcttcctatggtggaaatgctggtggttatggaggtaaccctccttatagtggcaatgctgttggtggtggcggtggctatggaagcaattttggcggcggcggtggatatggtgttgcaggtggtgttggtggaagtgaaaactttgcccaaggcagctccactaatgctggctttgatgacaagtttgagagcaaccaaccattaggcaatgatacggatcatcagactgaaagcggtttgggaggcgatgaacaatttggtggcagtgacaatcaatttggagatgcagagaacggtaacacagagaatggtccagttgggtttgatcaaactgacgatggcgatgttgccaagagagcctag

SEQ ID NO: 848 - DNA, 429 bp, Brassica napus
atggctttctgcaaaagtctcggtggtctactcagacaaggtgtggtttctcagaccggaaatattccggttacgtctgtgctcggttctctccggtacatgtctaccaagcttttcgttggaggtctgtcatggggaactgatgaccagtccttgagggaggcttttgcaaactttggtgaagtggtcgatgctaaagtcattgttgatagagaaacaggaaggtcaaggggttttggatttgtcaactttactgatgagaccgctgctaatactgccatttcagagatggacggaaaggatctgaatggacggagcattcgggtgaatgttgctaacgaaagaccaagtactccccggtatggcggaggtggtggctatggtggaggtggctatggagcaggtggtggtgatggtgccggttactaa

SEQ ID NO: 849 - DNA, 327 bp, Brassica napus
atggcttttctgagtaagttgggaaacatattgaagcagaccaatgctaagggctctttatcaacaagcccttcgcttttccaggcgataaggtgcatgtcgtcttctaagctctttattggaggtatggaatatggcatgaatgaggatagcttaagagaggctttcagcaaatacggtgaagttgtcgaaactagagttattttggatcgtgagactggtaggtcgagggggtttggatttgtcacattcacctctacagaggctgcctctagtgctatccaggctttggacggccaggattgtaaaagtgaattatgcacatga

SEQ ID NO: 850 - DNA, 489 bp, Bambusa oldhamii
atggcggccttcaacaagcttggcagcctttttaggcacagtgctttggcgagcagtgcgtcgaccggctcaactcctgccatgttcaatgctgctcggctcatgtccaccaagcttttcgtgggcggtctttcctggggtactgatgaccaatcactgaaagatgcgtttacgagttttggggaggtcgttgaagctcgggtaatcactgacagagacactggaaagtcaagagggtttggctttgtgagtttctccaatggagacgatgcaaagaatgctatgtctagcatggacggtcaggaacttgaagggaggaatatccatgtgaacttcgcgaatgagagacctgcaggaaaccggggcttcagtggtggtggcagctatggtggtggaggcggcggcgcctacggtggcggctatggcagcggtaaccaaagctacggcaacagcagttttggtgggtctggaggacaggatgtcttttaa

SEQ ID NO: 851 - DNA, 399 bp, Euphorbia lagascae
atggctttctgtaacaaacttggaagccttttgaggcagagcgtttctcagagcggtcacatgttgaattctatgcggtacatgtctaccaggctttttgttggaggtctttcctggggaactgacgagcaatctctgagggatgcgttctctagttttggtgaagtgactagcgctaaggtcatcacagatagagacactggaaaatccaggggatttggatttgttgactttgattgcactgattctgcaaactcagcattgtcttccatggatggccaggaattgcaaggacgaaatattcgtgttagtctcgcaaacgatagacctgaaagatccaacaatagaggctttaacaataattatcaggggaatagaggctttggtggtgatttttaa

SEQ ID NO: 852 - DNA, 738 bp, Glycine max
atggctttctttggtagaattgggaatttattaagacagacagcaagcaggcaggttagttcagaattgcgatcatccccttcgttttttcaggctatacgcagtatgtcatctgctccaagcacaaagctgtttatcggaggtgtttcatattctactgacgagcaaagtttgagggaagctttttcaaaatatggtgaagttgttgatgctaggataattatggatcgtgaaactggtagatccagaggatttggctttattacatacacttcggttgaggaggcatcaagtgccattcaggccttggatggtcaggatctacatggtcgcccgattagggtgaattatgctaatgaaagacctcgtggatatggtggcggtggctttggttcatacggtgctgtaggtggcggtggctatgaaggtggtagcagctatcgtggtggttatggtggtgacaactatagtcgaaatgatgggagtggttatggatatggtgtaggcaatcatgaaagctctactggttttgccagtaatggatatgatggaagtgttgtggatggtggtgttggtgcaggtagtggcactagctttgctgatggctatgatggaagtgcggggtctgaatttggcagcagtggccaattagatagcaaagcaagcagcaaaggagatgaggattttggtgattacagggatgacaacgatgcagatgattttgccaagagggcttga

SEQ ID NO: 853 - DNA, 507 bp, Hordeum vulgare
atggcggccctcatcaagctcggaagccttcttaggcagagtgctttcgcgagcagcgcatcgacaggctcggctcctgccctgttcaacgctgcccgtttcatgtgcgccggccagtctggtcctagctccaagcttttcgtcggtggtctcgcctggggtactgatgatcactcgctcaaggaggcgtttcaaagcttcggagaggtcaccgaagcacgtgtcatcactgacagagagactggaaggtctagagggtttggttttgtgagctttgcgagtgaagaggatgcacgaaatgccgacaaaggcatggacggtcaggagcttgggggaaggaacggccgtgtgaactttgccaatgagagaccttctggtggcggtggcttacgtgctggtggtggcggtggctatggaggtggtggcggcggctatggcggtggtggcggctatggtggtggtggaggacgtgattatggtggtggtggaggacgtgattccttctaa

SEQ ID NO: 854 - DNA, 351 bp, Hordeum vulgare
atggcggccctcatcaagctcggaagccttcttaggcagagtgctttcgcgagcagcgcatcgacaggctcggctcctgccctgttcaacgctgcccgtttcatgtgcgccggccagtctggtcctagctccaagcttttcgtcggtggtctcgcctggggtactgatgatcactcgctcaaggaggcgtttcaaagcttcggagaggtcaccgaagcacgtgtcatcactgacagagagactggaaggtctagagggtttggttttgtgagctttgcgagtgaagaggatgcaggaaatgccgccaaagcatggacggtcaggagcttgggggaaggaacgtccgtgtga

SEQ ID NO: 855 - DNA, 900 bp, Hordeum vulgare
atggcgttcctgcagaaggtcgggaatgccctcaagcgctccgcgggctccagctcggcgatgctccaggcggtccgctccatgtcctcctccaaggtcttcgtcggaggcatctcgtacggcaccgatgaccagagcctcggggatgcgttttccaactacggccaagtcacggaagccaaggtgatcatggaccgtgaatccggaaggtcaagggggtttggtttcgtgaccttcacttcgtcggaggaggctggagctgccattactggaatggatgggaaggatctgcagggtcggatagtgagggtgagctatgctcatgaccgtggtagtcgtccaagttttggtggtggcggtggctatggcggcggcggtggcggcggctatggtggcggtgacggtggttacagtggaggaggtggtgcctatggtggtggtggaggctacagcggaggtggtggatatggaggtggaggcagaggtggcggtggtggatacaacagtggtggcaattatggtgcccctcaaggcgggcaaggtggctatgggggcgatgctggtttcacaggggttggtggtggtggtggatacaatgctgctcctgccaacaactatggtggcgatagcctgaatcaagggggtggagcacctcctgcatttggaggtggaaactttggcgcaggcaatgacagctacgcggacgatgcccctgttgatctgccccctgaaaagctcaatgacctgctgaagggtcttaaatttgatgttgctggcaaggagggtggtgctggggagggggagggcgctggcgtggttgacgtggacaccaaggaggatgactttcttgatgacgacttgagcaaggatgaagatgactacgtcaacaagagaagctga

SEQ ID NO: 856 - DNA, 507 bp, Hordeum vulgare
atggcggccctcatcaagctcggaagccttcttaggcagagtgctttcgcgagcagcgcatcgacaggctcggctcctgccctgttcaacgctgcccgtttcatgtgcgccggccagtctggtcctagctccaagcttttcgtcggtggtctcgcctggggtactgatgatcactcgctcaaggaggcgtttcaaagcttcggagaggtcaccgaagcacgtgtcatcactgacagagagactggaaggtctagagggtttggttttgtgagctttgcgagtgaagaggatgcaggaaatgccgccaaaggcatggacggtcaggagcttgggggaaggaacgtccgtgtgaactttgccaatgagagaccttctggtggcggtggcttccgtgctggtggtggcggtggctatggaggtggtggtggcggctatggcggtggtggcggctatggtggtggtggaggacgtgattatggtggtggtggaggacgtgattccttctaa

SEQ ID NO: 857 - DNA, 450 bp, Linum usitatissimum
atggccttttacagcaaattgggtagcctagtgaggcagagtgtttcccagagcggtcctgctccgatgggatctatgttcaactcgatccgttgcatgtcttcaaacaagctctacatcggaggtctttcttattcgaccgatgatcactctctgaaggaggcatttgaccgctatggtgaggtggttgatgccaaagttatccttgatagagaaactggcaggtcaagaggatttgggttcgttaactttgcagacaacgaggctgctaattcagcagtgtcgtccatggatggacaggagcttcatggtcggaacattcgtgtgagtattgccaacgaaaaacccagcgctccaaggagttatgacagcggctctcgcggaggtggaggctatggcggcggtggaggcagcagaggctatggcggccgtgatgatgatgggttctaa

SEQ ID NO: 858 - DNA, 435 bp, Nicotiana sylvestris
atggctttctacaacaaactcggtggtcttttgaggcagagcatttctggaaatgcagtaagtgcaacatcaccaatgccgtcaatgcttgatgccgtccggtgcatgtcgacgaagcttttcgttggtggtctttcatggggaactgatgatcagtctctgagagatgcctttgctacctttggtgatgttgttgatgcaagggtaatcgttgacagagattctggcagatcaaggggatttggatttgtgaacttctcagatgatgaatgtgccaatgaggctattaaggcaatggatggtcaggaactccagggaaggaatattcgtgttagtattgcccaagagagagctcctcgaagcggaggttttggcggttccggtggtggatttggtggcggctatggtcaagctagagacaatgatggatactaa

SEQ ID NO: 859 - DNA, 834 bp, Nicotiana tabacum
atggcttttttcaatagagttgggagtattcttaaacagagtgtaagcaaacactcaaacttggaactctctgcctcaaatgcgtcgcttttccaggcaataagaagcatgtcttcgtctaagctttttgttgggggtctctcatatggcactgatgagagctctctgaaggaggcattttcccaatacggtgatgtgatcgaagctagagttattatggatcgtgatactgggaggtccagaggttttggttttatcagttttccatcaagtgaagaagcagcaagtgcattgcaggccatggatggccaggatcttcatggaagacggataagggtgaattatgcaacagaaaagcgtcgtgctggatttggaggtggctacggtggaggtggtggtggctttaactacggtggtgaaggtggaaattctgcaggtgctggaggttacccaaccaacaattatggtggtggattttctggtggtaacacttctgctggtggatacggtagctatggaggtggcagtaactatggaaatgacaacagttcccctgctgagggaggcgtggggtatggcagtgctaactatggaaacactccgaacagcaattattccggtccaggcaatagcttttcaggtggttatgacggtggaaacaatggaaatggctttggtgagagccccggagcatcatttaatggaggtcaagaacaggtcagtgtagatcaagggactcaatctataaatgaagatattggacaggagacatcagaaggaaattacagggatgatgatgatgagccaaaggatttcgccaactccaggggttga

SEQ ID NO: 860 - DNA, 1506 bp, Oryza sativa
atggctttcgctggtagagttgtgaatgcgctcaggaggacttcggtctcgtccaacccgtcgctgctccaggcagtaagatgcatgtcctcaaagcttttcgttggaggactttcgtatgccacagacgacaccaccctcaaggatgtgttttctcactacggcgatgttcttgaagctaggatcatcattgatagggacacaggaaagtcaaaagggtatggatttataacttacacatcaagcgaggaagctgcggctgccgttactgccatggatggcaaggatcttcaaggacgaattgtaagggtcagcaccgccaatgaccgtgctggtggaatacgtggaggtggtggatttggcgctggtggttatggaagtggcggtggatatagcagtggtggtggatatggtactggtgagtatggcagaggtggtggatatgctggcaatggtggatacggtggcagggcttctgaatatggtggttatggtgctgggggatacagcagtagtggaggctataatgctaccagtgttcttcatggaaatgctggtggctacggtagctctgaagctctgatgtttacaatactaccaacacctatggcgctggcaacttcagccatagtggtcagtccggtggcagcttcggtggaaacaacggtggaattagtggtggatgatttggtgccgccggtagcagcaacctccacaactctgccaacttcagccatggtggtggtggctttggtgaaaacagtggtggatataacagcggacaatttggtgccgcgggtcacagcaatggcggctactctgccagcaacttcagtaatgctagctttggtgcaaacagtagtgtatttagcagtggacaatctggtgccaccggtcgcaacaacggtggcaactcggccagcaacttcagcctcggtggcagctttggtgcaaacaatggtggaattagcagtggacaatttggtgccgtgggtcacagcaatggaggctactctaccagcaacttcagccgtggtagcggctttggtgcaaacagtggtggatccagcaatggacaatatggtgccgcgcatggcaacaacggcagcaacttcagccacggtggcggctttggtgcacaaatggtgggaacaggagaaggatatacccgagaatggccctccgctggattgtgaggcagaattgcctccgttggtgttgttgttcgcggcaccggctccaggcgcaccacctccggctccagctccaggtgcgccatctcctccagcagctccagcagcagctccggctcgaggcgcagacatggcgatggcgaggatgagcagtcgtgtgggtagcactccccaaaaacctgatcacccgcctacccggtgtagatctcaggcgaaggtttcactcagaaccttgactggtactgggctgccgttcgcatcccctctgtttggagcatataagtcaaactccaggccttttatgagtatctag

SEQ ID NO: 861 - DNA, 954 bp, Oryza sativa
atggccttcttgcggaaggttgggaacctcgtcaggcagtccgcaggctcgggctcgccgctgttccaggcggtccgatgcatgtcctcctcgaagctcttcatcggaggaatctcttatggtactgatgaccagagtctgaaggaagcgtttgctaactacggtgaagtcattgaagctagggtgattgtggaccgtaccactggacggtcgaggggatttggttttgtaacctacacatccacggatgaggctgcagctgccattactggcatggacgggaaggatctgcagggccggattgtgcgggtgagttatgctcatgaccgtggtagccgtgctggtggctatggtggtggaggctacagtggacagggtacgtatggtggtggcggtggctatggaggtggaggctatggtggacaggatgcatatggtggtcgtggtgttggaggctatagtgagggtggccgtgggtatgttggtggtggatacggtgacggtaacaattacggtgggtataacacaagtggtggatataattctgaaggtgggcgtggtggctatagtgtttttgaaggtggacatggctacggtagtggcggtactggttacacaggaggcagcggcggatataattcggcccctggaaattacagcagtgacaacttcaatcaagggggtgcagcacctggtgcatatgaaggtgcaaactacggtggaggcaacaactacatgaacaatgcaaccagtgatgattccaccggtaagctggacgagttgttaaatgatcttaaagttgatggtgatggcaaagaggatggtgagggcaaagcggatggcgctggcctggttaatgaggatctgaaaggagatgatggtcaggatgaattgcttcagaatgatttcaaagatgaagatgtgtctgatgactatgccaacaaaagacgttaa

SEQ ID NO: 862 - DNA, 453 bp, Oryza sativa
atggcggccttcaacaagctcggtagcttcctcaggcacagtggcttgacaagcagtgcctcggccggctcttcccctgccatgttcaatgctgctcgtctgatgtccaccaagcttttcgttggtggtctttcttggaatactaatgacgattcgctgaaagaggcattcaccagcttcggggatgtgactgaagctcgggtgatcaatgacagagaatctggaaggtcaagagggtttggctttgttagctttgccaatggcgatgatgccaagagtgccatggatgccatggacggtaaggaacttgagggacggagtatccgcgtgaacttcgcgaatgagagacctccagggaaccgaggtggcggcgggtatggtggtggtggcggtggttatggcaaccaaggaggctatggtgatggcaaccgaggctatggagggcagtactaa

SEQ ID NO: 863 - DNA, 474 bp, Physcomitrella patens
atggctttcttcgctaaattcggaggcctgttgcgccacaattcggcccaggctgcgatgatgaagtccggactcggagctggtgcggctgcggtacccgcgatgctcatggcgcagcgcttcatgtctagctccaagttgtttatcggaggtcttgcctgggcaactgacgagaacacgttgagggacgcttttggttcctttggtaccgtgactgatgtgaagatcatccttgacagggatactgggaggtctaggggtttcggattcgtgaacttcacatctccccaggaggccgaagttgcacttcaggagatggatggccgggaattagctggacgtcaaattcgggttgactatgccactgacaagtcagatggagctcctcgaggcggcggcggcggcggcggctggcgtggaaactatggagatcggcagtctagcggaggccgtttcgatagcaatagagactaa

SEQ ID NO: 864 - DNA, 468 bp, Physcomitrella patens
atggctttcctagcgcagctcggaggcttggtgcgccaatcaattgcacgcaacgcgttgcagcggcacagtggtgctgcggccattcctgctatgtttctcgtttcgaggggcatgtctggctcgaaactctttgtgggcggtcttgcatggggaaccacggacgacaacatcaaggaggcgttttcagctttcggagaagtgaccgaagttaagattatttgcgacagagataccggcagatccaggggctttgggtttgtgacttttgccactgatcaggatgccgaagctgctcttcaggcactggacgggcgggacttggctggtcgcactattcgagtgaactacgctaccaagcagtcaccacaggacaggcaatcgggtggtggtatgtacggtcgccgtgaccactcaggtggtaacagtggcaactttggtgggagcggaacctggaggggcatgtag

SEQ ID NO: 865 - DNA, 402 bp, Populus trichocarpa
atggcattctttaacaagctcgggagcctagcgaggcagtcaatttcccagaaggggcaagttccaatggtgtccatgttgaacactattcgctgcatgtcgtcatccaagcttttcattggagggcttccatggtcagctgatgaccaaacccttaaagatgcattttctggctttggggaagtgacagaggcaagggttatcatggatagagagaccgggaggtctcgtggatttgggtttgttcattacgacagcgttgaaaatgccagcgaagcactttcagcaatggatggccagaatttgggaggaagaactgttcgagtgagctttgccgaggaaaggagaccaccacaatcctacaatgacaatcaccaagggagtcgaggttttgataattaa

SEQ ID NO: 866 - DNA, 474 bp, Picea sitchensis
atggcgttcgctgctaagttaggaagtctgctcaagcaatccgtaactaaacatgtcagttcaaggccttcagtttatatgcctgccatctacagcgctttccggtgcatgtcctctaaagtcttcgtcggaggtctttcgtatggggttgatgatcagactctcagagagtcctttgcaacctttggcgatgtcatggaggcaaagattattaatgacagagagactgggagatcgagaggctttggtttcgtcacttttgcttctccagatgaggccaatgcagccgtcgaggccatggatggaaaggaccttcaaggccgttccattcgtgttaacattgcacaagagcgaacctttggtggcggcggctttggcggtggcggcggcggaggttacagtggcggtggcggcggaagttacagtggcggtggcggcggcggaagttacagtggcgggggcggcggctggtga

SEQ ID NO: 867 - DNA, 666 bp, Picea sitchensis
atgtcctttgcaagcaaggttggaagcctcttacggcaaggtatctctggccgtctgggctttaatgaaaccagatcagtaccatctatttaccatgctttgagatatatgtcctcctcaaggctttttattggaggtttatcgtatgggatggatgaccagtctcttagggagtcattcactgaatatggtgaagtcattgaagcgagaatcattcacgaccgggagactggtaggtcaagaggctttggttttattagcttcacttctaatgaggaggccgcagctgccataacaggcatggatggaaaggatctccatggacgtcttgttcatgttaactatgctactgaaagaactggaggttttcgttctggtgggggcggctatggtggtggtggtggctacaatcagaatgatgggtacggaactggcggtggtggctacagtcaaaacgatgggtacggaactggcggtggtggctccagtcaaaacgatgggtatgtaactggtggtggctatagccaaaatgatgggaatgcaagtggtggtagctacagtcagagtgctgggtatgatggaacatctgagggcacaagcacaggcagaactaaagatgacttcggctatgatgataatgttggcaacgcgggcaagggatactag

SEQ ID NO: 868 - DNA, 441 bp, Pisum sativum
atggctttctgcaacaagcttggaaacctcttgaggcagggtgccactcagagcagccatgctcccgtttcatccatgcttaactatcttcgccatatgtcatcaagcaagcttttcattggaggcctttcttatggagttgatgatcagtctcttaaggatgcatttgcaagctatggggaggtcgttgaggcaagagttatcactgatagagacaccggaagatcgaggggatttggttttgtcaacttcaccagtgatgagtctgcaacttcagcactctctgctatggacggacaggatttgaatgggcgaaacattcgtgtgtcttatgcaaatgacagaccttctgcacctcgtggtggtggtggtggttatggtggtggctatggggatggtttttcaaaccgtggtggcggtggcggaggtggcggttggtga

SEQ ID NO: 869 - DNA, 726 bp, Populus trichocarpa
atggcgtttcttactaaattgggaaatatgttacggcagactgctaataggcagatcacttctgagatctctgcatcaagaccatccatctatcaagcattaagatgcatgtcatcctcaaaaattttcattggaggtatttctttccagacagatgacaacggtctgaaagaggcctttgataaatatggcaatgttgttgaagcaagaatcattatggatcgtgatactggcagatctagaggatttggattcgttacttacacctccagtgaggaggcctctagtgccatccaggccatggatggacaggatcttcatggtcgccgcgttagggtgaattatgcaactgaaaggcctcagcgtacctttaacaataattatggcaactatggcggtggaggatacggcggcggcggtggaggatacggcggcggcggtggaggatacggcactggtggaggatatggctctaattatgctggtcaaagcacttatgacggtggtgctgggaattatggtgctgctgctggtggtggcagaagcgatggctataccaacaccagtgttgatggtggatatgatggaaatgctggattgggttatggtggcggcaatcagtttggtgccaatgagagtagtggtgatggtttgaacctagatgatgcgttggacaaaaactccaaggaagatgatgatgctggtgattttgccaaaagggtatga

SEQ ID NO: 870 - DNA, 444 bp, Sorghum bicolor
atggcggccttcaacaagcttggcagccttctaaggcacagtgctctggcgagcggtgtcgctgctagctcgtctcctgctgtgttcaatgctgctcggctcatgtccaccaagctattcgttggtggtctttcatggggtgttgatgacatgaaactgagagaggcgtttagtggctttggagatgttactgaagcgcgagtgatcacggacagggacactgggaagtcaagaggatttggctttgttaactacaccagcagtgatgctgccaatgcagctatatctggaatggatggcaaggaaattgatgggcggccggtacgtgtcaacattgctaacgacagacctgcagggaaccgcggtggaggtggctatggcggtggtggtttcggaggtggtggctatggtggtggcaaccaaagctatggtggtggctattaa

SEQ ID NO: 871 - DNA, 753 bp, Sorghum bicolor
atggctctggctaataagcttggtggtctgctcaagaaagccacgagttcaaatccgtctgtctatcaagcaatcagatgcatgtcatccaagctctttgttggagggctttcttatggaactgatgatcacagtctcagagatgagtttgccaaatatggagaagtcattgaagctaggattatccttgaccgtgagtctgggaggtctagaggttttggctttgtaacttacacatcttctgaggaggcttcagctgccatcactgccatggatggaaagactcttgatggacgaagcatacgggttaatcatgccaacgagaggacaggtggcttccgcggcagcggtggtggtggttatggtggtggcggcttcggtggtggtggctatggcggtggcggcggtggctatggtggtggcggcggtggctatggtggtggctatggtggcaactacggcaacaggggtggcggtggctatggtggtggtgttggtgattatggagctgcaggtggagctggaggcaactttgctgctggaggtagtaacagctttgccagcagtaacttcggtgctgacagtggttttggtggaaaccctgctggtagctttggcggtggttccactggcgccgatgagttctctggtggcacatttggtggcgacttgagtggtaacaagaatgatgaaatcatggaggatatgttcaaggatgatgagcctgacagcttcgccgacaagaggagctag

SEQ ID NO: 872 - DNA, 774 bp, Solanum lycopersicum
atggctttctttaacaaagctgggagcattcttcggcaggctgttagcaagcagcacatcaatcacgaaatatctgcatccaagccttcaatttttcaacttattagatgcatgtcttcaaaactttttgttggaggaatctcatggaacacgaatgacaactctctccaagaagctttcagcaagtatggagaagtcgttgaagcaagaatcatttacgatcgtgagtctgggagatctaggggatttggcttcgttactttcaatacttctgaggatgccagtgctgccatccaggctttggacggacaggagcttgatggtcgtaggattagagtaaatgtagcgaatgacaggacaagaggatacggtggcggttacggtggcggtaactttggaggcggtggtggttatggtggcggcggcaattatgggtctggtggttatggtggtggtggtggcaattatgggtctggtggtggcaattatggtgcctctggttatggtagcagtggcaattatggcagcgcaggtggtgttgatgctaacatcgccagcagttatggaagcggagaaagcaattttggctttggcacaagtggtgataactatgccagtggaagcactgatgctgctgctagcaacagcttcagcttcggcaacgacactaccagcaaccaagcagaagcttctgatgttaatagcccagttgatgcaggtgaaaattacagagatgacaatgactccaacgattatgcagatagaagagcctaa

SEQ ID NO: 873 - DNA, 528 bp, Triticum aestivum
atggcggccctcatcaagctcggaagccttcttaggcagagtgctgtggcgagcagtgcctcgaccggctcggctcctgccctgttcaacgctgcccgcttcatgtgcgccggccagcccgctgatggcaacaagcttttcgtcggcggcctggcctgggctactgacgatcattcgctgaaggaggcgttccaaagctttggagaggtcgttgaagcacgtgtcatcactgacagagagactggaaggtctagagggtttggttttgtgagcttcgccaatgaagaggatgcaaagagcgctgcaaaaaacatggacggcaaggagcttgcagggaggaacgtccgtgtgaacttcgccaacgagagaccttcgggtggtggcggcggtggcttctcacgcggcggcggtggctatggaggaggtggcggcggagacggcggcggcggctacggtggtggcggcggagacgacggcggccgtggccgaggtggaggtggctatggtggtgaccatgaagcctactaa

SEQ ID NO: 874 - DNA, 660 bp, Triticum aestivum
atggccttggttaataagcttggtaatctgctcaagaaagccaccagctcgaacccgactctctatcaggcgataagatgcatgtcatcatcgaagctcttcgttggagggctttcctttaacacagacgagggcagtctgagagatgccttttcccattatggagaaattattgatgctaagattatcgtagaccgcgacactggaaggtctagaggttttggctttataacttatgcagcagaagaacaggcttcatctgccatcatggccttggatggaaaggatctacatggacgcaacctacgggttagtgctgccactgagaggaccgctggcttccgtaatggtgctggttatggaggtggtggtggcggctttggaggaggaggatatggcggtggtggctatggaggaggtggttatggtagcaacagtggtggtggcggcgacaactttgctgccggcaactttggtggtgccagtggcttcggtggaaacccagctggaaaccatggtgctcctgcaggttccaccggtggtgatgagttctccctcggcacccctggttccacctttgaaagcaccaagaatgacgatgtcatggaagacctcttcaaggatgatgaacctgacaagtacgccagcaagaatgtttag

SEQ ID NO: 875 - DNA, 522 bp, Triticum aestivum
atggcggccctcatcaagctcggaagccttcttaggcagagtgctgtggctagcagtgcctccaccggctcggctcctgccctgttcaacgctgcccgcttcatgtgcgccggccagcctgctgatggctccaagcttttcgtcggtggtctcgcctgggctactgatgatcattcgctgaaggaggcgtttcaatgctttggtgaggtcgttgaagctcgtgttatcactgacagagagactggaaggtctagagggtttggttttgtgagcttcgccagcggcgaggatgcaaagagtgctgcagaaaacatggacggcaaggagcttgcggggaggaacgtccgtgtgaacttcgccaacgagcgaccttcgggtggaggcggcggcggcggcttctctcgtggcggcggtggctatggaggtggtggcggcggctatggtggcggtggctttggtggtggcggcggatacggtggtggccgtggtggtggtggcggcggctatggtggtgaccgttag

SEQ ID NO: 876 - DNA, 531 bp, Triticum aestivum
atggcggccctcatcaagctcggaagccttcttaggcagagtgctgtggctagcagtgcctccaccggctcggctcctgccctgttcaacgctgcccgcttcatgtgcgccggccagcctgctgatggctccaagcttttcgtcggtggtctcgcctgggctactgatgatcattcgctgaaggaggcgtttcaatgctttggtgaggtcgttgaagctcgtgttatcactgacagagagactggaaggtctagagggtttggttttgtgagcttcgccagcggcgaggatgcaaagagtgctgcagaaaacatggacggcaaggagcttgcggggaggaacgtccgtgtgaacttcgccaacgagcgaccttcgggtggtggcggcggcggcggcttctctcgtggcggcggtggctatggaggtggtggcggcggctatggtggcggtggctttggtggtggcggcggatacggtggtggccgtggtggtggtggcggcggctatggtggtgaccgtgagtcctactaa

SEQ ID NO: 877 - DNA, 834 bp, Vitis vinifera
atggctttctttggtaaagttgggaacatacttcgacagactgtaagcaagcaggtcaactctcagttttctgtttccaacccatccatctaccaagcaataagatgcatgtcatcctcgaaactcttcattggaggtctctcatatagcacagatgacacaagtttaagagaagctttccataagtatggggaagtcattgaagcaagagtcattgtggatcgtgagactggtagatccagaggatttggatttgttactttcacttctagtgaggaggcctccagtgccatccaggccttggatggacaggatcttcatggccgtagggtgagagtgaactatgcaacggatagagcacgttctggtggctttggaggtggtggtggttatggaggtggcggtggtggctatggagggggtggttatggaggtggcggctatggtggaagtggcggctatggaggtggtggctatggtggtggtagtggtggatatggtggtggtggtgatagctatgggagtggaggtggaaactatggcagtggtggtggtggttatggtgggagtagcggtggctatggcagtggcgggaatttcagtgttgctggtggtagtgacaattatgttggtggtgctgctggaagcagtagcggctttcctagtggtggtggcagcagctttgccagtggtggggctgatcagttgggtaccaatgagagcagcagcgtgggtgatggtgctggggagttttctccagatgaacctgccacagaaggaaattacagggatgacgatgatgaacctgatgactatgccaacagaagggcttga

SEQ ID NO: 878 - DNA, 756 bp, Zea mays
agcatgcaacgcacgctttgaaagttccacaactcaaactcaacaaaaggactcgttccattatttagacatcagacacctatcatgttaacagaaaacactaccgaatacatatggcctagaatccacacggcctcgcatggtggtggtggacacaaattagctcctcttgttggcgtagctgtcaggctcatcgtccttgaagagatcatccatgatttcatcattcttgttaccgtcaccaggtgtgccagcagagaacccatcagcgccactggaaccacccgttgcgccaaagctaccagcagggttttcaccaaaaccactgtcagcaaagttactgctgccaaagctgtcgctacctccagcagcaaaactgccttcagccccacctgcaactccataatcaccaccaccaccatagccaccaccagccctgttgccgtagttgccaccatatccaccgctgccgccaccatagtcaccgctgccgccgccgccatagccaccgctaccaccaccatagccgccgccatagccaccaccataaccaccgctgctgcggaagccacctgtcctctcgttagcatgattaacccgtatgttccgtccatccagagtctttccatccatggcagtgatggcagccgaagcctcctcagaagacgtgtaagttataaagccaaaacctctggacctcccagactcacgatcaaggataatcttagcttcaataacttgtccatatttggcaaa

SEQ ID NO: 879 - DNA, 744 bp, Zea mays
atggcactggctaataagcttggtggtctgctcaagaaagccacaagttcaaatccgtctgtctaccaagcaatcagatgcatgtcatccaagctctttgttggagggatttcttatcaaactgatgatcacagtctcagggacgagtttgccaaatatgggcaagtcattgaagctaggattatcattgaccgtgagtctgggaggtctagaggttttggctttgtaacttacacgtcttctgaggaggcttcagctgccattactgccttggatggaaagactctcgatggacggagcatacgggttaatcatgctaacgagaagacaggtggctttcgtggcggcggtggctatggtggcggcggctatggtggtggtggaggctatggtggtggtggcggccactatggtggtggtggtggcagcggtggatacggtggcggcgactatggtggcaactacagcaacaggggtggtggtggtgattatggagttgctggtggaggtggaggcacctttactgctggaggtagcgacagctttgccaacagtaactttggttctgacagtagttttggtggaaacggtgctggtggctttgatgcaaccggcggttccacaggcgatgatgggttctctggcacacctgatgataactttggtggtaacaagaatgaagaaaccatggatgatatcttcaaggacgatgagccggacagctacgccgacaagaggagctag

SEQ ID NO: 880 - DNA, 435 bp, Zea mays
atggctttctgcaaaaatctcggtggtctattgaggcaaggtgcggtttctcagacagggaatgtacccgttcagtctatgctcgggtctctccggtacatgtctaccaagctctttgtcggtggtctctcatggggaactgatgaccagtcattgagggaggctttctccaacttcggtgaagtgatcgattctaaggtcattgttgatagggaaaccggaaggtcaagggggtttggatttgtcaatttctctgatgagagtgctgctaatgctgcaatttcagagatggacggaaaggaactgaatggacgcaacatccgagtgaatgttgctaacgatagaccaagtgctccccgggcttatggaggtggtggcggctacggtggaggtggtggtggctatggaggaggtggtgatggaggcggttactaa

SEQ ID NO: 881 - DNA, 528 bp, Zea mays
atggcggccctcatcaagctcggaagccttcttaggcagagtgctgtggcgagcagtgcctcgaccggctcggctcctgccctgttcaacgctgcccgcttcatgtgcgccggccagcctgctgatggctccaagcttttcgttggcggtcttgcctgggctactgatgatcattcgctgaaggaggcgtttcaaagctttggtgaggtcgttgaagcacgtgttatcactgacagggagactggaaggtctagagggtttggttttgtgagcttcgccagtggcgaggatgcaaagagtgctgcagaaaacatggacggcaaggagcttgctgggaggaacgtccgtgtgaactttgccaacgagcgaccttcgggtggtggcggcggtggcttctctcgtggcggcggtggctatggaggtggtggcggcggctacggcggcggtggctacggtggtggcggtggatacggcggcggccgtggtggtggtggaggtggctatggtggtgaccatgagtcctactaa

SEQ ID NO: 882 - DNA, 462 bp, Zea mays
atggcggccttcaacaagcttggtggccttctaaggcacagtgctctggtgagcggtatcactggtggctcttctcctgcagtgttcaatgctgcacggctcatgtctaccaagctatttattggtggtcttgactggggtgttgatgacgtgaaactaagagaagcatttagcagctttggagaggttactgaagcgagggtgatcacagacagggagactgggaggtcaagaggctttggctttgtgaactactccgacagtgatgctgccaaggaagctatttctgcaatggatggcaaggaaattgatgggcggcaggtacgtgtcaacatggctaatgagagacctgctgggaaccgtggtggtggtggctatggcggcggcggctatggaggtggtggctacggaggtggcggcggctacggaggtggtggtcttatttaccgttttgcattgtag

SEQ ID NO: 883 - DNA, 927 bp, Zea mays
atggctttcgctagtagaattggaaatgcgctcaggagaactttagcgcccacttgctccccactgcttcagccagtaagatgcatgtcctcttccaagctctttgttggaggactttcttttgccaccgacgaaaccactctgaaggatgcattttctgagtttgggaatgtacttgaagctcggatcatcattgatcgggaatcagggaggtcaaggggttttggttttataacttttacatccactgaagaagcctcagctgcaatgacttccatggatggcaaggaacttcaaggacgaaatataagggtgaaccatgccaatgaacgcgctggtgggatacgcgggggtggtggattcggagctggtggtggttatggtggtggaggtggatatcctactggtgggtatggcggtggtggatatagttctggtggtggtggaggatatagttctggtggtggaggaggatatagttctgggggttatgctgccaatggttacggtgttggatctggcagtggctatggtggcacctacagcaatgcatcaggtggtggatattcaggcagtgatggttacggcaatggagctgccagtggtggttatgctaacaacttgagcagcggatacaacagcaatggaaggtacaataccattggcagttctgatggaaacactggtgggtacaattcgtctcccaacccgtatggtgtaggcaactacaatactggaggttcgagttccagtggtggaaccttaggagagtttggtggtggaggttttggtggcaacaactttgctggaaatgttaccggggggttttctggcggtggggcaagctatggagctaacaagccgcaatacaatggcgacgacgacctgctgggcgaaggtttcttcgacaaggaagtggcagagtaa

SEQ ID NO: 884 - DNA, 921 bp, Mesembryanthemum crystallinum
atgtcttctgcaacagctaacccttgtctcaaaaccctttctttatcccacaattgcttcactacttccctttatacaccttcaatcttcaaccctaaatcccataatttctcaattccattaaaacccactaaactcaacctctctatctctgttttctcccccttttcaccacaaaaatcttcaacaattgtctcctatgttgctcagacttcagattgggatcaagagagctctaatgctcttcttgatgatgaacagcaagtaggtggtgctacttggggtacccagaattttggggactctgaacctcaagtttctggtgttggaaatgaagatgaagaagaaagtgaacaaggcttctctgaacctcctgaagaggctaaattgtttgtgggtaatttgccttatgatgttgatagtgagagattagctcagatttttgatggggctggagttgttgagattgctgaggttatttacaacagggagactgataggagtagagggtttggatttgtgaccatgagtacagttgaagaagctgaaaaggctgtggaaatgttgaatggatttgacatgaatggaaggctcttaactgtaaacaaggctgctccaaggggatcacgcccagaaaggcctcctcgagagtttgaaccttcttgcagagtctatgttggcaaccttccatgggatgtggacaatgctcgcctagagcaagtttttagtgaacatgggaaagttctaagtgccagagtagtttctgacagggagaccggccgttcacgtgggttcggttttgtctctatggcctctgagtcagagatgaatgacgccattgctgctcttgatggacagacattggatggaagggccatcagggtaaatgttgcagaagaaagaccaagacgtgcgttttga

SEQ ID NO: 885 - DNA, 879 bp, Nicotiana plumbaginifolia
atggcttcttcttcagtctcttctctccaattcctcttcgttacctcacaaaccccttcttctcttaaacccaattccacactttccttcttctctctcccttcttcatctctaaacctttctttatcttcttcttcaattggccattctgcttctattaagccttttgaatcttccttttcgactcgtgttgcgctctctgattttgaccaattggaagatgatgttgaagtagcagaacaacctcgtttttctgaagaccttaaactctttgttggtaatttgccttttagtgttgatagtgctgctcttgctggcctttttgaacgtgctggaaatgtcgaaattgttgaggttatatatgacaagctctctggaagaagcagggggtttggttttgtgacaatgtctacgaaagaggaagtcgaagctgctgaacaacaattcaatggatatgaaattgacgggagggcaatacgggtgaatgcagggccggcaccagccaaaagggagaattcttcgtttggaggtggaaggggtggaaattcttcatatggaggtggaagggacgggaattcttcttttggaggtgcacggggtgggagaagtgttgacagcagcaatagagtatacgtaggaaacctctcgtggggcgtcgatgacctggcacttaaagaattgttcagtgagcaaggtaatgttgtggatgccaaagtagtctatgatagagatagtggtcgatcaaggggctttggatttgttacatacagttccgcgaaagaggtcaacgatgcaattgatagcttgaacggcattgaccttgatggcaggtcgatacgtgtaagcgctgctgaagagcgaccaaggcgtcaattttga

SEQ ID NO: 886 - DNA, 948 bp, Nicotiana sylvestris
atgtcgtgtgcaacaaagccaataatcaagccttcatccatggcaacgaacagttgcctcatttctcttcctcccctctttgccaccaccacaaaatccaaatcttttgcttacccatatctctcaaacacattaaaacccattaaactcctccacctttcttgcacttattctccttgtatcttatccccaaaaaagaaaacatcagtttctgcactgcaagaagaagaaaacacccttatccttgacggccaaggacaagaatctggagacttgtttaactttgaacctagtggtgaagaaacagaagaagaagggtttgtagaggcagttggagatgctggggagagtgatgaggttgaagcagacgaggaggaggaggagtttcaagaaccacctgaagatgctaagttgtttgttgggaatttaccttatgatgtagacagtgaagggctggctcggctttttgagcaggctggtgttgttgagattgctgaggttatttacaatagggacactgatcaaagtcgtggatttggttttgtgacaatgagtacggtggaagaagctgagaaagctgtggaaatgtacaatcgttatgatgtcaatggaagactcttgacagtcaacaaagctgctcgtagaggagagcgacctgagcgtccgcctcggacatttgaacagtcttacaggatctacgtaggcaatatcccatggggcattgatgatgcacgccttgagcaactgttcagtgaacatggtaaagtagtaagtgctcgggtagtttatgacagagaaactggccggtcgcgaggttttggttttgttacgatggcaagtgaagctgaaatgagtgatgcaattgcaaaccttgatggacagagtttggatgggaggacaatcagggtaaatgttgctgaagatagatccaggcgcaacacgttttga

SEQ ID NO: 887 - DNA, 822 bp, Nicotiana sylvestris
atggcttcctcagcttcttccctccatttcctttcccttacacctcaaacacttcctctaccaaaacctacttctcaaacaacttccctttccttcttttcccttcctccttcttctctcaacctttctttatcttcttcttcatcttgtttttcttctcgttttgttcgtaaggttaccctttctgattttgaccaaattgaggatgttgaagatggtgatgatggtgtagaagaagaacgtaatttctctcctgaccttaaaatctttgtcggtaacttgcctttcagtgctgatagtgctgctcttgctgagctttttgagcgtgctggtaatgttgagatggttgaggttatctatgacaagcttacaggaagaagcagaggttttggttttgtgacaatgtcctcaaaagaggaagttgaagctgcctgtcaacaatttaatggatatgaactcgacgggagggcattgagggtgaattctgggccaccaccagagaagagggagaattcttctttccgtggaggcagcaggggtgggggaagttttgatagctccaatagagtctatgtaggaaacctcgcatggggtgttgaccaagacgcacttgagaccttattcagtgagcaaggtaaggttgtggatgccaaagtagtctatgatagggatagcggtagatcaaggggcttcggattcgtaacatacagttccgctgaggaggtcaacaatgcaattgaaagcttggacggagttgaccttaacggaagggccatccgtgtaagccctgctgaagctcggccacccaggcgtcaattctga

SEQ ID NO: 888 - DNA, 795 bp, Oryza sativa
atggcggccaccctcttctccacctcgctcacccccaccttcctcccggccgtcccctgccccaagcccgcgccgccggcctcagcctgcttcccctgcgcgctgccgccgcgcgccgcgctagcggcgccaccggcgccgctgcggaggcggctttctcccgtggccgtcgcggtgtcgtcggaggtggaggaggaggagggtggcgcggagtccgagggggagttcgccgaggacctcaaggtgtttgttggtaaccttccgttcagcgtcgacagcgcgcagctcgcggggctcttcgagcaggccggctccgttgagatggtcgaggttgtatatgacagacagaccggaagaagccgtggctttggattcgtcacaatgtctacagctgaagaagctggtgctgccgtcgaacaattcaatggatacacattccaaggaagacctctgagggtaaactcagggccgcctccgcctcgggatgatttcgcgccaagatcacctaggggtggtgggagcaactttgattcatccaacaagctctatgtagggaaccttgcttggggtgtcgacaactcgacactcgagaacctgttcagtgagcagggaaccgtgctcgatgccaaggtcatctacgacagggagagcggcaggtcgaggggttttggttttgtcacctatggctccgctgaagaagtcaacaatgccatatcaaatcttgacggcgttgacctggacggcaggcagatccgagttacagttgcagaatcaaagccaaggcgccaattttga

SEQ ID NO: 889 - DNA, 939 bp, Persea americana
atgtcttctgcaactcccctcttcaagccctttcccatggtaccctcctcccccatcctcttctcttccaaacccccctgcccttttctccccatcccctcaaaacccatcaagctcatccatctctccacctcatcctcttcatgggtttctttcaagaagagcccttctccctcgagccggtctctaaccacccttgtggctcaaacctccgactgggctcagcaagaggaagatagcaatgttgccgaagccactttatcagattgggaaggagaaggtgaaggagaaggagaggagcagacggagagcggcgctgaagatggagaagagagcggcggtgacgggtttgtagaggggggtgaagaagattcttacccgttgccgcccgaagaggcgaagctattcgtagggaatctcccctatgatgtggaccaccaggccctcgccgagcttttcgaccaggcgggaactgtggaagtggcagaggttatttacaatagagaaacagatcagagtcgcgggtttggttttgtgacgatgagtactgttgaagaagccgagaaagcagtggagatgttcaaccgatatgatatcaatggaaggcttttgactgtaaataaagcagccccaagaggggcccgagtggatcgacctcctcgagcatttgaacctgctttcaggatgtacgttgggaatcttccatggcaagttgatgatgcccgcttggagcaggtgttcagtgaacatggtaaagtggttgaagctagggttgtctatgacagggagacaggacgttcacgtggatttggttttgtgacgatgtccactcagactgagttagatgatgcaattgctgctcttgatggacagagtttggatggaagggctatcagagtgaatgtggctgaggaccgaccaaggcgtgcctccttttaa

SEQ ID NO: 890 - DNA, 900 bp, Picea sitchensis
atggccatggcggcggcatcatcgtgtgtattcagttcgtcgtccattatcagcaatgaccgcctgagcgcctctttgaagcgtctcgaccctgcgaccaagaggaaggcgggggcgcctgtagaaatcgtatctatgatatcatcgcctaattgtgcggggactcgatccttttcccttgcggcgggattttgcggggtaccactgttttcatctacacacaaaaagaacaataattcgtttctagcaagaagtgtaacaatggcgcctcggcaggcttcagagtgggaagaagatgaagaagaagatattgagaacagcagtccctctgcgaacctcaaagtatttgtggggaatctgccctggagtgttgacagcgccgagttagcagagcttttcaaggactctggcgatgtcacaatggttgaggtaatatatgaccgacaaacaggaagaagtcgtggttttgcatttgtgacaatggcaacgcaagcagatgcagacgaagctgtggagaagtttaatggatatgaataccagggtagaactttgagggtgaactcagggccaccacccccaaaagatagttttgcaccaagaggcggatttaggaatgaaaagcccagtggcaattataattctgccaatagagtttttgtgggtaatctgccttggggagctgatgatcttagcctagaacaactttttagcgatcacggaaaagttatggaagcaaaagttgtgtatgatagagagactggaaggtcaaggggttttggttttgtcactctttcgtctcctcaggaaatagaggaggcaatatcttctctggatggatcggatatggatgggaggcaaataaaagtgactctagctgagacaaagcctgccagcttttga

SEQ ID NO: 891 - DNA, 873 bp, Picea sitchensis
atggcatcctccgtcacgttatccaactccctgtctgtcattggcggtcgcccctcggtcccttcggcccgtcacgatgtcttccccgcggctgtcactctcgccttcccttcctcgctcttccgctccctctctctctccgtctcctcggcgtcatggccgccggcggccgccgcgtcaatcagaaagaggggcggcgtcaagagggcgcctgtcatggcaaacgcctcggagtgggagcaagatgtaggggtcaagactcaagaagaaggagaagaaggagctggggacggtgaaatcgattttgagaatgagtttgtggaacttccagaggggacgaagctgtttgtgggaaatttgcccttcaacttagataaccagcagcttggcgagctctttgaaggcgctggagaagtcttggatgttaatatcattacggacagagaaactggaaactcacgcggctttggttttgtgaccatgggcactgttgaagaggcagagaaaggtgttgagcttttcaacagacatagcttggagggcagactcttgacagtcaacaaggctgctcctcgaggaaccaaagttgaaaggccatctcaagctggctcttccaccaacaaaatctatgttggaaatttgccatggcaggctgatgataatagcttgttgcaattattcagcgaacatggaaaggttttggaagcaagagttgtatatgatagagaaactgggcggtcacgaggctttggtttcgttacatactcatcagagagtgaagttaatgacgccattgctgcccttgatggaactgatatggatgggaggcccttgagagtgaacattgccgaggacagaagacgaggattttga

SEQ ID NO: 892 - DNA, 597 bp, Spinacia oleracea
atgggtgacgatgatgccggacgacaacctaacttctcccctgaccttaagatttttgtgggtaatcttccatttaatgttgacagtgctgagctcgctgggttgttcggtgctgctggtaccgtcgaaatggttgaggttatatatgataaattgactggaaggagcagagggtttggatttgtgaccatgtcttctgttgaagaagtagaagcagccgctcagcaattcaataactatgaacttgatggcaggaccttgagggtgactgaggactcacataaagatatgactttacctagagtcgagtcagagtgtgatagctttgggagctccaaccgggttcatgtggggaatctttcatggaaagttgatgatgatgccctcaagactctttttagcgaaacgggagatgtagtggaagcaaaggtgatttatgacagggatactggccgttccagagggtttggatttgtaacttacaattctgctaatgaggtcaacactgctattgaatccttagacggcgtggatttgaatgggaggtctatccgagtaactgccgcagaagcaaggcagaggcgtggccccaagtga

SEQ ID NO: 893 - DNA, 507 bp, Adonis aestivalis
atggcttccgcagatgttgaatacagatgtttcgttggtggtctagcttgggctaccgatgacaagagtcttgaaaaggctttcggcgctttcggcgagattcttgaatctaagatcatcaacgaccgtgagactgggagatccaggggattcggattcgtgacattcgctaaccaacaagccatgcaggatgctattgagcagatgaatggacaagagcttgacggaagaaacatcactgttaatgaagctcaatcccgtggaagcggcggatctcgcagtggaggtggcggcggaggctaccaaagtggcggtggtggatacggcggtggcggcggtggtggttatggtggacgacgtgaaggtggtggcggtggatacggaggaggtggtggtggttatggtggacgacgtgaaggaggtggtggtggccgtggatatggtggaggtggtggtgatcgttattcaagccgtggtggtggtgactctgacagctggaggagttaa

SEQ ID NO: 894 - DNA, 528 bp, Chorispora bungeana
atggcgtccgcagatgttgagttcaggtgcttcgttggcggtctagcctgggccactgatgacagagctctcgagactgcattctcccagtacggcgacgttgttgattccaagatcattaacgaccgtgagaccggaagatcaaggggatttggattcgtcacattcaaggacgagaaatccatgaaagacgccattgagggaatgaacggacaagatctcgatggtcgcagcatcactgtgaacgaggctcagtcccgtggaagcggtggcggaggtggtggccgtggaggcggcggtggtggataccgcagcggtggaggcggtggctatggaggtggtggtggaagttacggaggcggtggaggtagacgcgagggtggatacagcggcggtggtggaggctacccctcaagaggaggtggcggaggaggttacggtggtggtggtggccgacgtgagggtggatacggaggtggtgaaagtggtggatacggaggaagcggtggaggtggaggcggatggtaa

SEQ ID NO: 895 - DNA, 546 bp, Cryptomeria japonica
atggcttctgccgatgttgaattccgttgcttcgttggtggcctttcctggtccactgatgacaggagcttgaaagatgccttcacggctttcggcgaagtcatggattctaaggttgtgagcgatcgagagaccggaagatcccgagggtttggatttgtaacttttatggatgagcagtccatgagagatgccattgaaggtatgaatggacgggatttggatggaagaaatattactgtaaaccgtgcccaagccagaggaggcggcggcggcggcggtggcggtggcggtggctatcgtggaggcggcggtggcagcggaggatatggtggtggcggtagtggtggctatgaaagtcgtcgaagtggtggtggaggaagtggtggtggaggttatagtggaggaggccgtgagcgatctgagcgcggttatggtggcggaagccgcaatggaggaggatatggtggttatagcggtggcggcggcggcggctctcgttacgggggagggggtgtgtctgatgacggtggctggagaagttag

SEQ ID NO: 896 - DNA, 492 bp, Dianthus caryophyllus
atggcggaagttgagtacagatgtttcgttggcggtctctcatggggcaccgacgaccgttctttggctgaagctttcaacaagtttggtgaagttactgattctaagatcatcaatgaccgtgagactggaagatccaggggttttggattcgtcacttttgcaaatgagcagtccatgagagacgccattgatgagatgaacggaaaggagctcgacggacgttcaatcactgtcaacgaagctcagtctcgtggatctggaggtggcggcggcggtggtggctaccgtagtggtggcggtggcggtggaggatatggaggtggtggtggtggctatggaggtcgccgtgaaggtggtggcggtggaggatatggaggaggaagtggtggtggttacggtggtcgtcgtgaaggtggtggtggcggaggatatggcggaggtggtggcggtggataccgtggcaactctgacggcaactggaggaattaa

SEQ ID NO: 897 - DNA, 375 bp, Glycine max
atggcttctgcagatgttgagtaccgttgctttgtcggtgggctcgcttgggccactgacgaccatgccctcgagagagccttctctcagtacggcgaaatcgttgaaacgaagattatcaacgatcgtgagactggcagatccaggggttttggatttgtgaccttcgcctcggagcagtccatgaaagatgcgatcggagcgatgaatggacagaacttggacggccgtaacatcactgtcaatgaagctcagtcccgcggtggccgccgcacgcgcacccttcgccgccgtcacgcctccgcgcccgagaacgctaactccgaaacccgcactctccctctctgccccaataacaacaacagcacccaataa

SEQ ID NO: 898 - DNA, 516 bp, Glycine max
atggcttcttcagatgttgagtaccgttgctttgtcggtgggctcgcttgggccactgacgaccaagctctcgagagagccttctctcagtacggcgaaatcgttgaaacgaagattatcaacgatcgtgagactggaagatccaggggttttggatttgtgaccttcgcctcggagcagtccatgaaagacgccatcgaagggatgaacggccaaaaccttgacggccgtaacatcactgttaacgaagctcagtcccgtggtggcggtggcggcggaggcggtggaggtggtggatatggtggtggtcgcggtggtggatatggtggtggtggtcgcggtggtggagggggatacaaccgtagcggtggcggtggaggctatggcggcggcggtggatatggcggtggcggtggcggtggctatggcggtggcagagaccgtggttatggtggtggtggtgaccgtggttactctcgtggtggtgacggtggtgatggaggctggagaaactag

SEQ ID NO: 899 - DNA, 483 bp, Glycine max
atggcttctgcagatgttgagtaccgttgctttgtcggtgggctcgcttgggccactgacgaccatgccctcgagagagccttctctcagtacggcgaaatcgttgaaacgaagattatcaacgatcgtgagactggcagatccaggggttttggatttgtgaccttcgcctcggagcagtccatgaaagatgcgatcggagcgatgaatggacagaacttggacggccgtaatatcactgtcaatgaagctcagtcccgcggtggcggcggcggcggcggcggaggaggaggaggatacaatcgtggtggcggtggatatggtggtcgtagtggcggtggcggtggcggtggtggataccgtagccgtgacggtggttatggcggtggctatggtggtggtggtggtggtggttatggcggtggcagagaccgtggttactctcgtggtggtgatggtggtgatggaggctggagaaactaa

SEQ ID NO: 900 - DNA, 462 bp, Hordeum vulgare
atggccgacgtcgagtaccgctgcttcgtgggcggcctcgcctgggccaccgacgaccagtccctccagaacgccttctccaagtacggcgacgtcatcgactccaagatcatcactgacagggagacgggccgttcccgcgggttcgggttcgtcaccttcgcgtcggacgaggcgatgcgccaggccatcgaggccatgaacggccaggacctggacggccgtaacatcaccgtcaacgaggcccagtcccgccgctccggcggaggaggaggcggcttcggcggcggcggcggcggctacggaggccagcgtcgtgagggcggaggcggcggctacggaggcggcggcggtggctacggaggtggccgcaccggcggcagcggcggctacagcagccgtgacggcggcggcggcggctacggcggcagctgccgcggctactgtggcagccgcagctga

SEQ ID NO: 901 - DNA, 528 bp, Hordeum vulgare
atggcggagacggagtaccgctgcttcgtgggcggcctcgcctgggccaccgacgaccacaacctccaggccgccttcagccagtacggcgagatcctcgacgccaagatcatcaacgaccgtgagacggggaggtcgcgcgggttcgggttcgtgacgttcgggagcgaggagtcgatgcgccaggccatcgaggagatgaacggcaaggagctcgacgggcgcagcatcaccgtcaacgaggcccagtcccgccgctccggcggcgggggcggcggcggcggcggctacggcggccagcgcggcggtggcggaggctacggcggcggtggcggctacggcggccagggaggtggctacggcggccagggaggcggtggctacggcggccagggcggtggtggctacggcggccagcgcggcggcggcggcggctacggcggtggcggcggtggttacggcggcggcggtggcggctacggcggccagcgcggcggcggcgactccggcggccagtggaggtcctga

SEQ ID NO: 902 - DNA, 486 bp, Hordeum vulgare
atggccgacgtcgagtaccgctgcttcgtgggcggcctccgctgggccaccgacgaccagtccctccagaacgccttctccaagtacggcgacgtcatcgactccaagatcatcactgacagggagacgggccgttcccgcgggttcgggttcgtcaccttcgcgtcggacgaggcgatgcgccaggccatcgaggccatgaacggccaggacctggacggccgtaacatcaccgtcaacgaggcccagtcccgccgctccgacggaggaggcggcttcggcggcggcggcggcggctacggaggccagcgtcgtgagggcggaggcggcggctacggaggcggcggcggtggctacggaggtggccgcagcggcggcggcggcggctacggcagccgtgacggcggcggcggcggctacggcggcggcggcggcggctacggtggcagccgcggcggctccggcggcggcaactggagggagtga

SEQ ID NO: 903 - DNA, 471 bp, Nicotiana glutinosa
atggcagaagttgaatacaggtgcttcgtcggtgggttagcatgggctaccaccgaccaaacacttggggatgctttttctcagtatggcgaaattctcgactcgaagattatcaatgacagagaaactggtagatctagaggatttggatttgttaccttcaaggatgagcaagctatgagagacgctattgaagggatgaacggccaggaccttgacggtcgtaacataaccgtcaacgaagctcagtctcgcggaagcggcggaggtggtggcggttaccgtggtggacgcggtggcggtggtggaggctacggaggtggtggccgtcgtgaaggtggatacggtggtggtggcggcggttacggaggcggccgtcgtgaaggtggatacggtggtggtggcggttatggaggtggtcgtcgtgaaggtggttacggtggtggctctgaaggaaactggaggaattaa

SEQ ID NO: 904 - DNA, 474 bp, Nicotiana tabacum
atggctgaagttgaatacaggtgcttcgtcggtgggctagcatgggctaccaccgaccaaacacttggggatgctttttctcagtacggtgaaattgtcgactcgaagattatcaatgacagagaaactggtagatctagaggatttggatttgttaccttcaaggatgagcaagctatgagggacgctattgaagggatgaacggtcaggaccttgacggtcgtaacatcaccgtcaacgaagcccagtctcgcggaagcggcggaggcggcggtcgcggtggtggcggtggaggctacggaggtggtggaggctacggaggtggtggccgccgtgaaggtggatacggtggcggcggtggcggttacggaggtggccgccgtgatggtggttacggtggtggtggaggttatggaggtggccgtcgtgaaggtggttacggtggtggctctgaaggaagctggaggagttaa

SEQ ID NO: 905 - DNA, 489 bp, Oryza sativa
atggcggcgccggatgttgagtaccgctgcttcgtcggcggcctcgcctgggccaccgacgaccgctccctcgaagccgccttctccaccttcggcgagatcctcgagtccaagatcatcaacgatcgggagacggggaggtcgcgcgggttcgggttcgtgacgttctcgagcgagcaggccatgcgcgacgccatcgaggggatgaacggcaaggagctcgacggccgcaacatcaccgtcaacgaggcccagtcgcgccgctccggaggcggaggcggaggcggctacggccagcgcggcggaggcggaggctacggtggcggcggcggctacggtggtggcggcggcggtggctacggccagcgccgtgaaggcggctacggcggtggcggcggctacggtggcggccgtggcggcggcggcggctacggcggtggctacggcagccgcggcggcggcaactccgacgggaactggaggaactga

SEQ ID NO: 906 - DNA, 486 bp, Oryza rufipogon
atggcggcgccggatgtcgagtaccgctgcttcgtcggcggcctcgcctgggccaccgacgaccgctccctcgaggccgccttctccacctacggcgagatcctcgactccaagatcatcaacgacagggagacggggaggtcacgtgggtttggcttcgtcaccttctcctccgagcagtcgatgcgcgacgccatcgagggcatgaacggcaaggagctcgacggccgcaacatcaccgtcaacgaggcccagtcccgccgctccggcggcggaggcgggggctacggcggcggcggtggcggctacggcggcggtcgtggaggcggcggctacggaggaggtggcggcggcggctacgggcgccgtgagggcggctacggtggcggcggcggctacggcggcggccgtggcggcggcggcggctacggtggcagccgtggcggcggctacggcggcgactccggcgggaactggaggaactga

SEQ ID NO: 907 - DNA, 486 bp, Oryza rufipogon
atggcggcgccggatgtcgagtaccgctgcttcgtcggcggcctcgcctgggccaccgacgaccgctccctcgaggccgccttctccacctacggcgagatcctcgactccaagatcatcaacgacagggagacggggaggtcacgtgggtttggcttcgtcaccttctcctccgagcagtcgatgcgcgacgccatcgagggcatgaacggcaaggagctcgacggccgcaacatcaccgtcaacgaggcccagtcccgccgctccggcggcggaggcgggggctacggcggcggcggtggcggctacggcggcggtcgtggaggcggcggctacggaggaggtggcggcggcggctacgggcgccgtgagggcggctacggtggcggcggcggctacggcggcggccgtggcggcggcggcggctacggtggcagccgtggcggcggctacggcggcgacttcggcgggaactggaggaactga

SEQ ID NO: 908 - DNA, 417 bp, Oryza rufipogon
atggcggcgccggatgtcgagtaccgctgcttcgtcggcggcctcgcctgggccaccgacgaccgctccctcgaggccgccttctccacctacggcgagatcctcgactccaagatcatcaacgacagggagacggggaggtcacgtgggtttgtcttcgtcaccttctcctccgagcagtcgatgcgcgacgccatcgagggcatgaacggcaaggagctcgacggccgcaacatcaccgtcaacgaggcccagtcccgccgctccggcggcggaggcgggggctacggcggcggcggtggcggctacggcggcggtcgtggaggcggcggctacggaggaggtggcggcggcggctacggtggcagccgtggcggcggctacggcggcgactccggcgggaactggaggaactga

SEQ ID NO: 909 - DNA, 498 bp, Oryza sativa
atggcggcgccggatgttgattaccgctgcttcgtcggcggcctcgcctgggccaccgacaaccgctccctcgaagccgccttctccacctacggcgagatcctcgagtccaaaatcatcaacgatcgggagacggggaggtcgcgcgggttcgggttcgtgactttctcaagcgagcaggccatgcgcgacgccatcgaggggatgagcggcaaggagctcgacggccgcaacatcaccgtcaacgaggcccagtcgcgccgctccggaggcggaggcggcggtggctacggccagcgcggcggaggcggaggctacggtggccgcggctacggtggtggtggcggcggcggtggctacggccagcgccgtgaaggcggctacggcggtggcggtggctacggtggcggcggtggtggcggcggctacggcggcggctacggcggcggctacggcagccgcggcggcggcaactccgacgggaactggaggaactga

SEQ ID NO: 910 - DNA, 585 bp, Oryza sativa
atggcggcgccggatgttgagtaccgctgcttcgtcggcggcctcgcctgggccaccgacgaccgctccctcgaagccgccttctccacctacggcgagatcctcgagtccaagatcatcaacgatcgggagacggggaggtcgcgcgggttcgggttcgtgacgttctcgagcgagcaggccatgcgcgacgccatcgaggggatgaacggcaaggagctcgacggccgcaacatcaccgttaacgaggcccagtcgcgccgctccggaggcggaggcggcggtggctacggccagcgcggcggaggcggaggctacggtggcggcggctacggtggtggtggcggcggcggtggctacggccagcgccgtgaagcggctacggcggtggcggtggctacggtggcggccgtggtggcggcagctacggtggtggctacggcagccgcggcggcggcaactccgacgggaactggaggaactgagcggtggggccctcatggccaagttatctatctatctaatcgagctaccatcatcatcatccgatcgttatcatcgttagttttgtgtggaactatctag

SEQ ID NO: 911 - DNA, 486 bp, Oryza sativa
atggcggcgccggatgttgagtaccgctgcttcgtcggcggcctcgcctgggccaccgacgaccgctccctcgaagccgccttctccacctacggcgagatcctcgagtccaagatcatcaacgatcgggagacggggaggtcgcgcgggttcgggttcgtgacgttctcgagcgagcaggccatgcgcgacgccatcgaggggatgaacggcaaggagctcgacggccgcaacatcaccgtcaacgaggcccagtcgcgccgctccggaggcggaggcggcggtggctacggccagcgcggcggaggcggaggctacggtggcggcggctacggtggtggtggcggcggcggtggctacggccagcgccgtgaaggcggctacggcggtggcggtggctacggtggcggccgtggtggcggcggctacggcggcggctacggcagccgcggcggcggcaactccgacgggaactggaggaactga

SEQ ID NO: 912 - DNA, 489 bp, Oryza sativa
atggcggcgccggatgtcgagtaccgctgcttcgtcggcggcctcgcctgggccaccgacgaccgctccctcgaggccgccttctccacctacggcgagatcctcgactccaagatcatcaacgacagggagacggggaggtcacgtgggtttggcttcgtcaccttctcctccgagcagtcgatgcgcgacgccatcgagggcatgaacggcaaggagctcgacggccgcaacatcaccgtcaatgaggcccagtcccgccgctccggcggcggaggcgggggctacggcggcggcggtggcggctacggcggcggtcgtggaggcggcggctacggaggaggtggcggcggcggctacgggcgccgtgagggcggctacggtggcggcggcggctacggcggcggccgtggcggcggcggcggcggctacggtggcagccgtggcggcggctacggcggcgactccggcgggaactggaggaactga

SEQ ID NO: 913 - DNA, 486 bp, Oryza sativa
atggcggcgccggatgttgattaccgctgcttcgtcggcggcctcgcctgggccaccgacaaccgctccctcgaagccgccttctccacctacggcgagatcctcgagtccaagatcatcaacgatcgggaaacggggaggtcgcgcgggttcgggttcgtgacgttctcgagcgagcaggccatgcgcgacgccatcgaggggatgaacggcaaggagctcgacggccgcaacatcaccgtcaacgaggcccagtcgcgccgctccggaggcggaggcggcggtggctacggccagcgcggcggaggcggaggctacggtggcggcggctacggtggtggtggcggcggcggtggctacggccagcgccgtgaaggcggctacggcggtggcggtggctacggtggcggccgtggtggcggcggctacggcggcggctacggcagccgcggcggcggcaactccgacgggaactggaggaactga

SEQ ID NO: 914 - DNA, 483 bp, Oryza sativa
atggcggcgccggatgttgagtaccgctgcttcgtcggcggcctcgcctgggccaccgacgaccgctccctcgaagccgccttctccaccttcggcgagatcctcgagtccaagatcatcaacgatcgggagacggggaggtcgcgcgggttcgggttcgtgacgttctcgagcgagcaggccatgcgcgacgccatcgaggggatgaacggcaaggagctcgacggccgcaacatcaccgtcaacgaggcccagtcgcgccgctccggaggcggaggcggaggcggctacggccagcgcggcggaggcggaggctacggtggcggcggcggctacggtggtggcggcggcggtggctacgccagccgtgaaggcggctacggcggtggcggcggctacggtggcggccgtggcggcggcggcggctacggcggtggctacggccgcggcggcggcaactccgacgggaactggaggaactga

SEQ ID NO: 915 - DNA, 429 bp, Oryza sativa
atggcggcgccggatgtcgagtaccgctgcttcgtcggcggcctcgcctgggccaccgacgaccgctccctcgaggccgccttctccacctacggcgagatcctcgactccaagatcatcaacgacagggagacggggaggtcacgtgggtttggcttcgtcaccttctcctccgagcagtcgatgcgcgacgccatcgagggcatgaacggcaaggagctcgacggccgcaacatcaccgtcaatgaggcccagtcccgccgctccggcggcggaggcgggggctacggcggcggcggtggcggctacggcggcggtcgtggaggcggcggctacggaggaggtggcggcggcggctacgggcgccgtgagggcggctacggtggcggcggctacggcggcgactccggcgggaactggaggaactga

SEQ ID NO: 916 - DNA, 696 bp, Oryza sativa
atggcggcgccggatgtcgagtaccgctgcttcgtcggcggcctcgcctgggccaccgacgaccgctccctcgaggccgccttctccacctacggcgagatcctcgactccaagatcatcaacgacagggagacggggaggtcacgtgggtttggcttcgtcaccttctcctccgagcagtcgatgcgcgacgccatcgagggcatgaacggcaaggagctcgacggccgcaacatcaccgtcaatgaggcccagtcccgccgctccggcggcggaggcgggggctacggcggcggcggtggcggctacggcggcggtcgtggaggcggcgcctcaacctctcacggcctcctcctcaagagagacctcctcaccgccatggccgagctccaatgtcagggctactggtccttcgccctctccacgctccacgttgcccgcgccgagccttgtcattgcctgcgccgacccctgcctgcttcgtctgctagcctctcagtctcgctgaagaagagaatagaggagacgaaaggaaagatgatagaaaagagaagaagaaaaaagaaaaagaaaagaaagagaagagaagagatgacacagacatgtggtgcccactgtatgccatgtcagcgaaacctggaaaaattgggtcaatactgccttgggactttttttttttttttgcacagtttgtaa

SEQ ID NO: 917 - DNA, 414 bp, Oryza sativa
atggcggcgccggatgtcgagtaccgctgcttcgtcggcggcctcgcctgggccaccgacgaccgctccctcgaggccgccttctccacctacggcgagatcctcgactccaagatcatcaatgacagggagacggggaggtcacgtgggtttggcttcgtcaccttctcctccgagcagtcgatgcgcgacgccatcgagggcatgaacggcaaggagctcgacggccgcaacatcaccgtcaatgaggcccagtcccgccgctccggcggcggaggcgggggctacggcggcggcggtggcggctacggcggcggtcgtggaggcggcggctacggaggaggtggcggcggcggctacgggcgccgtgagggcggctacggcggcgactccggcgggaactggaggaactga

SEQ ID NO: 918 - DNA, 468 bp, Picea glauca
atggcttcagcagatgttgagttccggtgcttcgttggaggccttgcatggtccacagatgatagaagcctgcaggaggctttcagtccatatggcgaagtcgtggaatccaagattattagtgatcgggaaaccggtagatctcgtggatttggcttcgtgaccttcaacgatgagcaatcaatgagggatgccatcgatgcaatgaatggcaagatgcttgacgggaggagcatcaccgttaacccggcccaatccagagggaacggcggtggtggcggcggcggtggttcgcgtggttaccgtggaggcggcggtggcggcggttacggtggtagccgtgaccgtggtgaccgtggttatggcggtggtggtggcggctatggcggcggcggtggtggttacggtggcggtggcggttctcgctatggtggaggtggttctgagggcggtagctggaggagataa

SEQ ID NO: 919 - DNA, 519 bp, Picea sitchensis
atgatggcttcagccgaggtcgaataccgttgctttgtcggtggtctcgcttgggccaccgacgatagaagcctgcaggacgctttcagcccttttggggaaattttggagtcgaagattataagcgaccgggaaactggcagatcccgcggattcggcttcgtgaccttcagcgacgagcagtcaatgagggatgccatcgatgccatgaacggcaaggtgctcgacggcaggaacatcactgttaatccggcccagtccagaggcaacggtggtggtggtggcggcggcggcggtcgtggcttccgtggcggcggtggcggcggttacggaggtggccgtgaccgtccggaccgtggttacggtggtgggcgcggtggcggtggcagcggcggttacggtggtaggggaggttacggtggcggtggtggatcacgctacggtggtggcggtggtggaggctacggtggtggtggttacggtggtggtggcggctctgaaggcgcctggaggagataa

SEQ ID NO: 920 - DNA, 498 bp, Populus trichocarpa
atggctgctgaggttgagtacaggtgctttgttggtggcctcgcatgggccactactgaccaatcccttcaagaagcgtttagccagtacggtgaaatcatcgattcgaagattataaacgatcgtgaaactggaagatctcgcggctttggatttgttaccttcaacaacgagaaggcaatgagagatgcgattgatggaatgaacggccaagaccttgatgggcgtaacatcaccgtgaatgaagcacaatcccgcggaagcggcggtggtggcggaggtgggggctacagccgtggaggcggtggcggttacggaggtcgccgtgaaggtggcggaggcggttatagccgtggtggaggtggatacggcggtggtggaggtggatacggcggcggcggtggtggttatggtggtggacgtgaccgtgggtacggtgatggtggatcaaggtattcttccaggggcggatctgatggtggtagctggagggactag

SEQ ID NO: 921 - DNA, 537 bp, Prunus avium
atggcctctgccgagatcgagttccgttgcttcgtcggagggctcgcctgggccaccgacaatgatgcgctggagagggccttttctccgttcggtgagatcatcgaatcgaagatcatcaacgaccgtgagaccgggaggtccaggggcttcggctttgtcaccttcagcaatgagaaggccatgagggacgcgatcgaaggcatgaatggccagaacctcgacggccgtaacatcaccgtcaacgaggctcagtctcgtggaagcggcggtggtggtggcggtaacggaggaggttacagccgtggaggcggcggcgggggatatggcggcggcggcggctacggaggtggcggccgacgtgaaggtggcggcggtggctacagccgtggaggcggcggtggaggatatggcagtggaggcggtggatatggcggtggtggccgtcgtgaaggtggttatggaggtggtgagggcggtggcgctcgctattccaggggcagcggtggctctgaaggcggcagctggaggagttaa

SEQ ID NO: 922 - DNA, 498 bp, Ricinus communis
atggccgctgctgatatcgagtataggtgcttcgtcggcggccttgcatgggctaccagcgacaaagcccttgaagaagcctttagtgcctacggcgaggtcctcgaatcgaagattattaatgatcgtgagactggtagatctcgtggattcggatttgtgaccttcaacaacgagaaatccatgagagacgctattgaaggaatgaacgggcagaatcttgacggccgtaatatcactgtcaacgaagctcagtctcgtggcggcggcggaggcggaggcggaggctacagaaatggtggcggcggtggatatggaggtggacgtcgtgaaggtggttatggcggcggcggcggttacagccgtggtggaggtggttatggtggcggcggcggtggctacggaggtggccgcgacagaggatacggtggtggtggtgatggtggatctaggtattccaggggaggtggtgcctctgagggtaactggaggagttag

SEQ ID NO: 923 - DNA, 507 bp, Rumex obtusifolius
atggatgctgaggttgagtacaggtgcttcgtcggcggcctcgcttgggccaccgacgaccaatctctggagagagccttctctaattatggtcaagttcttgaatcgaagatcatcaacgaccgggaaaccggcagatccaggggtttcggtttcgtcaccttctcgagcgagcaggccatgagggatgcgatcgagggaatgaacggccaggatcttgacggtcgtaacatcacagtcaacgaggctcagtctcgtggaagcggcggaggtggcggaggataccgcggtggaggcggtggaggctacggcggtcgtcgtgaaggcggctacaaccgtggcggcggcggtggctacggtggtggcggcggcggatacggtggtggcggcggtggatatggaggtggtggtggtggttacggcggtggacgtcgtgagggtggatatggcggcggcggcggtgaccgctatgctcgtggcaactctgactccgactggaggaattag

SEQ ID NO: 924 - DNA, 513 bp, Sorghum bicolor
atggcggcggcggacgtggagtaccgttgcttcgtcggtgggctcgcctgggccaccaacaacgagaccctcgagcaagccttcgccaacttcggccaggtcatcgactccaaggtcatcaccgaccgggagacggggaggtcccgcgggttcggcttcgtcaccttctcctctgagcagtccatgctcgacgccatcgagaacatgaacggcaaggagctcgacggccgcaacatcaccgtcaaccaggcccagtcccgcggcggaggcggcggcggcggtggctacggaggcggtggcggcggctacggcggccgccgtgagggtggcggctacggaggaggcggcggcggctacggcgggcgccgcgagggaggaggcggctacggaggcggtggctacggtggcggcggcggcggctacggcggtcgccgtgagggcggcggcggctatggcggcggcggcggctacggtggcaaccgcggtgactccggcggcaactggaggaactga

SEQ ID NO: 925 - DNA, 501 bp, Sinapis alba
atggcgtcccctgatgttgagtaccggtgcttcgttggaggtctagcatgggccactgatgacagagctcttgagactgccttctctcaatacggcgaggttcttgattccaagatcattaacgatcgtgagactggaagatcaagggggttcggattcgtgactttcaaggatgagaagtccatgaaagacgccatcgaagggatgaacggacaggatcttgatggtcgcagcatcactgtaaacgaggctcagtctcgtggaagcggtggcggaggaggaggccgtggtggcggtggtggataccgcagcggaggaggcggtggttatggaggtggtggtggtggatacggaggtggaggacgcgagggtggatacagtggtggtggaggaggttactcctcaagaggaggtggcggtggtggatacggaggaggtggcagacgtgatggtggtgaaggtggaggttacggaggaagcggtggtggtggtggttggtaa

SEQ ID NO: 926 - DNA, 510 bp, Sinapis alba
atggcttcccctgatgttgagtaccggtgcttcgttggaggtctagcatgggccaccgatgagagatctcttgagaccgccttctctcagttcggcgaacttgttgattccaagatcattaacgatcgtgagactggaagatcaaggggatttggattcgtcactttcaaggatgagaaatccatgaaggatgccatcgaagggatgaacggacaggatctcgatggtcgtagcatcactgtgaacgaggctcagtcgcgaggaagcggtgccggcggaggtggtcgtggtggtggcggtggataccgcggtggaggtggttacggaggtggaggcggtggttacggaggtggaagacgtgagggtggtggatacagtggtggtggaggtggctactcctcaagaggaggtggtggcggaggatacggtggaggtggaagacgtgatggtgggggatacggaggtggtgaaggtggaggctacggaggaggaggtggtggtggttggtaa

SEQ ID NO: 927 - DNA, 489 bp, Solanum commersonii
atggctgccgaagttgagtacagttgcttcgtcggtgggctcgcatgggccaccaccgatcgaacacttagcgatgctttctctacctacggcgaagtagtcgactcgaagatcattaacgaccgagaaactggtagatctagaggatttggctttgttaccttcaaggatgaaaaatccatgaaggaagcaatctcagggatgaacggttcggaacttgatggccgtaacatcactgttaacgaagcccaggcccgcggaagtggaggtggtggtggtggtggtggcggtttcggtggtggcagacgccgtgaaggcggtggcggtggttacggaggaggtggcggctaccgaggtggcggcggtggcggctatggaggtggcagacgtgaaggaggtggtggtggcggttacggaggtggccgacgtgaaggtggtggcggcggaggttacggtggtggtggatatggcggtggtgaccgttattag

SEQ ID NO: 928 - DNA, 528 bp, Solanum tuberosum
atggccgacgttgaatacaggtgcttcgtcggtggtctggcatgggccaccaccgaccaaacactttcggatgctttttctcagtacgccgaagtggtcgaatccaagatcatcaatgaccgggaaactggtagatctagaggatttggattcgttaccttcaaggatgagcaagccatgagggatgctatagaagggatgaaccgccaagatcttgatggtcgcaacatcaccgtgaacgaagctcaatcccgcggaggcgtggaggctggaggtggaagaggcggtggtggctacggaggtggccgacgtgaaggcggtggcggcggctacggcggttacggaggtggcagacgtgaaggcggtggcggcggcggctacagtggaggtggcggcggctacggaggtggtcgtcgtgaaggtggttatggtggaggcggtggtggttatggtggaggtgaccgctacagtgatcgctcttcaagaggaggtggcggtggttcttccgatggaaactggaggaattag

SEQ ID NO: 929 - DNA, 513 bp, Sorghum bicolor
atggcggcggcggacgtggagtaccgttgcttcgtcggtgggctcgcctgggccaccaacaacgagaccctcgagcatgccttcgccaacttcggccaggtcctcgactccaaggtcatcaccgaccgggagacggggaggtcccgcgggttcggcttcgtcaccttctcctctgagcagtccatgctcgacgccatcgagaacatgaacggcaaggagctcgacggccgcaacatcaccgtcaaccaggcccagtcccgcggcggaggcggcggcggcggtggctacggaggcggtggcggcggctacggcggccgccgtgagggtggcggctacggaggaggcggcggcggctacggcgggcgccgcgagggaggaggcggctacggaggcggtggctacggtggcggcggcggcggctacggcggtcgccgtgagggcggcggcggctatggcggcggcggcggctacggtggcaaccgcggtgactccggcggcaactggaggaactga

SEQ ID NO: 930 - DNA, 507 bp, Sorghum bicolor
atggcggcggcggacgtggagtaccgttgcttcgtcggtgggctcgcctgggccaccaacaacgagaccctcgagcaagccttcgccaacttcggccaggtcatcgactccaaggtcatcaccgaccgggagacggggaggtcccgcgggttcggcttcgtcaccttctcctctgagcagtccatgctcgacgccatcgagaacatgaacggcaaggagctcgacggccgcaacatcaccgtcaaccaggcccagtcccgcggcggaggcggcggcggcggtggctacggaggcggtggcggcggctacggcggccgtgagggtggcggctacggaggaggcggcggcggctacggcgggcggcgcgagggaggaggcggctacggaggcggtggctacggtggcggcggcggcggctacggcggtcgtgagggcggcggcggctatggcggcggcggcggctacggtggcaaccgcggtgactccggcggcaactggaggaactga

SEQ ID NO: 931 - DNA, 498 bp, Triticum aestivum
atggcggacgtcgagtaccgctgcttcgtgggcggcctcgcctgggccaccgacgaccagtccctccagaacgccttctccaagtacggcgacgtcatcgactccaagatcatcactgacagggagacgggccgttcccgcgggttcgggttcgtcaccttcgcgtcggacgaggcgatgcgccaggcgatcgaggccatgaacggccaggacctggacggccgcaacatcaccgtcaacgaggcccagtcccgccgctccggcggaggcggcggcggcttcagcggcggaggcggtggcggctacggcggccagcgccgcgagggcggaggcggcggcggctacggcggcggcggcggtggctacggaggtggccgcagcggcggcggcggtggctacggcagccgtgagggcggcggcggctacggcagcggcggcggcggcggcggctacggcggcagccgcggcggctccggcggcggcaactggagggagtga

SEQ ID NO: 932 - DNA, 318 bp, Triticum aestivum
atggcggacgtcgagtaccgctgcttcgtgggcggcctcgcctgggccaccgacgaccagtccctccagaacgccttctccaagtacggcgacgtcatcgactccaagatcatcactgacagggagacgggccgttcccgcgggttcgggttcgtcaccttcgcgtcggacgaggcgatgcgccaggcgatcgaggccatgaacggccaggacctggacggccgcaacatcaccgtcaacgaggcccagtcccgccgctccggcggaggcggcggcggcttcggcggcggctcctgcggcggctactggagggagtga

SEQ ID NO: 933 - DNA, 525 bp, Triticum aestivum
gacagaagggattgctgcatcaccgacgaccgaccgaccaagactgaaagataacacatgttgtttcttcctcgcgtaaccagctctaattaaccccggacagagcgacactcgagctcgcgatcaaaaacaccacaggactcaacgacacacacgacgactcagactgactgacacaggaactgaagataacttgctgacgaagacgacgagatggtagatagatcgataactggagggccccgccgctcagttcctccactggccgccggagtcaccgccaccacgctggccgccgtagccaccaccgccgccgccgtagccgccgccgccgccgccgtagccgccgccaccacgctggccgccgtagccaccaccgccctggccgtagccgccaccgccgccctggccgtagccgccaccgccctggccgccgtagccaccaccgccgccgccgtagcctccgccaccgccgcgctggccgccgtagccgccgccgccgcccccaccgccggagcggcggga

SEQ ID NO: 934 - DNA, 546 bp, Triticum aestivum
atggcggagacggagtaccgctgcttcgtgggcggcctcgcctgggccaccgacgacaacaacctccagcaggccttcagccagtacggcgagatcctcgacgccaagatcatcaacgaccgcgagacggggaggtcccgcgggttcggcttcgtcacgttcggcagcgaggagtcgatgcgccaggccatcgaggagatgaacggcaaggagctcgacgggcgcaacatcaccgtcaacgaagcccagtcccgccgctcgggcggagggggcggcggcggcggcggctaccgcggccagcgcggcggcggcggacgctacagcagatggcagcggctacggaggcggcggcgacggctacggcggacattgcggccagaaggcaaactgatcctgagggacaacgcggagacaataagcgagctcgaaggcatggcgaagtccctgcagtgggaggtgcgcatgacctacgccaaggacaaggaagggctgctctgcgtccaaaagaccacgtggcggcccaaggagatcgaagcaagcatgtag

SEQ ID NO: 935 - DNA, 492 bp, Triticum aestivum
atggcggacgtcgagtaccgctgcttcgtcggcggcctcgcctgggccaccgacgaccagtccctccagaacgccttctccaagtacggcgacgtcatcgactccaagatcatcactgacagggagacgggccgatcccgcgggttcgggttcgtcaccttcgcgtcggacgaggcgatgcgccaggcgatcgaggccatgaacggccaggacctggacggccgcaacatcaccgtcaacgaggcgcagtcccgtcgctccggcggaggaggcggcggcggcttcggcggcggcggtggcggctacgggggccagcgccgtgagggcggaggcggcggcggctacggcggcggcggcggcggctacagaggtggccgcagcggcggcggcggcggctacggcagccgtgacggcggcggctacggaggcggcggcggcggcggctacggcggcagccgcggcggctccggcggcggcaactggagggagtga

SEQ ID NO: 936 - DNA, 504 bp, Triticum aestivum
atggcggagacggagtaccgctgcttcgtgggcggcctcgcctgggccaccgacgacaacaacctccagcaggccttcagccagtacggcgagatcctcgacgccaagatcatcaacgaccgcgagacggggaggtcccgcgggttcggcttcgtcacgttcggcagcgaggagtcgatgcgccaggccatcgaggagatgaacggcaaggagctcgacgggcgcaacatcaccgtcaacgaggcccagtcccgccgctcgggcggagggggcggcggcggcggcggctacggcggccagcgcggcggtggcggaggctacggcggcggcggcggctacggaggcggcggcggcggctacggcggccagggcggtggcggctacggcggccagcgcggtggcggcggcggctacggcggcggcggcggctacggcggtggtggcggctacggcggccagcgcggcggtggcggcggcgactccggcggccagtggaggaactga

SEQ ID NO: 937 - DNA, 471 bp, Zea mays
atggcggcgtcggatgttgagtaccgctgcttcgtcggcggcctcgcctgggccacggacgaccactccctccacaacgccttcagcacctacggcgaggtcctcgagtccaagatcatcctcgatcgggagacgcagaggtcccgcggcttcggcttcgtcaccttctccacggaggaggcgatgcggaacgccatcgagggcatgaacggcaaggagctggacggccgcaacatcaccgtcaacgaggcccagtcccgcggcggccgtggaggcggcggcggtgggtacggtggtggccgtggaggcggcggctacggcggtggcgggcgccgtgatggcggcggcggctacggcggtggcggcggcggctacggtggcggcggcggctacggtggtggtggcggcggctacggcggtggcaaccgtggcggcggttacggcaactccgatgggaactggaggaactga

SEQ ID NO: 938 - protein, 153 aa, Arabidopsis thaliana
MAFCNKLGGLLRQNISSNGNVPVTSMLGSLRLMSTKLFIGGLSWGTDDASLRDAFAHFGDVVDAKVIVDRETGRSRGFGFVNFNDEGAATAAISEMDGKELNGRHIRVNPANDRPSAPRAYGGGGGYSYGGGGGGYGGGGGGYGGGGDGGGGF

SEQ ID NO: 939 - protein, 144 aa, Arabidopsis thaliana
MAFCNKLGGLLRQNISSNGNVPVTSMLGSLRLMSTKLFIGGLSWGTDDASLRDAFAHFGDVVDAKVIVDRETGRSRGFGFVNFNDEGAATAAISEMDGKELNGRHIRVNPANDRPSAPRAYGGGGGYSGGGGGYGGGGDGGGGF

SEQ ID NO: 940 - protein, 129 aa, Arabidopsis thaliana
MAFCNKLGGLLRQNISSNGNVPVTSMLGSLRLMSTKLFIGGLSWGTDDASLRDAFAHFGDVVDAKVIVDRETGRSRGFGFVNFNDEGAATAAISEMDGKELNGRHIRVNPANDRPSGGYGGGGDGGGGF

SEQ ID NO: 941 - protein, 150 aa, Arabidopsis thaliana
MAFCNKLGGLLRQNISSNGNVPVTSMLGSLRLMSTKLFIGGLSWGTDDASLRDAFAHFGDVVDAKVIVDRETGRSRGFGFVNFNDEGAATAAISEMDGKELNGRHIRVNPANDRPSAPRAYGGGGGYSGGGGGGYGGGGGSYGGGDGGGY

SEQ ID NO: 942 - protein, 136 aa, Arabidopsis thaliana
MAFCNKLSGILRQGVSQSSNGPVTSMLGSLRYMSSKLFVGGLSWGTDDSSLKQAFTSFGEVTEATVIADRETGRSRGFGFVSFSCEDSANNAIKEMDGKELNGRQIRVNLATERSSAPRSSFGGGGGYGGGGGGGY

SEQ ID NO: 943 - protein, 158 aa, Arabidopsis thaliana
MAFCNKLGGLLRQNISSNGNVPVTSMLGSLRLMSTKLFIGGLSWGTDDASLRDAFAHFGDVVDAKVIVDRETGRSRGFGFVNFNDEGAATAAISEMDGKELNGRHIRVNPANDRPSAPRAYGGGGGYSGGGGGYGGGGGGYGGGGGGYGGGGDGGGGF

SEQ ID NO: 944 - protein, 289 aa, Arabidopsis thaliana
MAFLSKVGRLFSQTSSHVTASSSMLQSIRCMSSSKIFVGGISYSTDEFGLREAFSKYGEVVDAKIIVDRETGRSRGFAFVTFTSTEEASNAMQLDGQDLHGRRIRVNYATERGSGFGGRGFGGPGGGYGASDGGYGAPAGGYGGGAGGYGGNSSYSGNAGGGGGYGGNSSYGGNAGGYGGNPPYSGNAVGGGGGYGSNFGGGGGYGVAGGVGGSENFAQGSSTNAGFDDKFESNQPLGNDTDHQTESGLGGDEQFGGSDNQFGDAENGNTENGPVGFDQTDDGDVAKRA

SEQ ID NO: 945 - protein, 142 aa, Brassica napus
MAFCKSLGGLLRQGVVSQTGNIPVTSVLGSLRYMSTKLFVGGLSWGTDDQSLREAFANFGEVVDAKVIVDRETGRSRGFGFVNFTDETAANTAISEMDGKDLNGRSIRVNVANERPSTPRYGGGGGYGGGGYGAGGGDGAGY

SEQ ID NO: 946 - protein, 108 aa, Brassica napus
MAFLSKLGNILKQTNAKGSLSTSPSLFQAIRCMSSSKLFIGGMEYGMNEDSLREAFSKYGEVVETRVILDRETGRSRGFGFVTFTSTEAASSAIQALDGQDCKSELCT

SEQ ID NO: 947 - protein, 162 aa, Bambusa oldhamii
MAAFNKLGSLFRHSALASSASTGSTPAMFNAARLMSTKLFVGGLSWGTDDQSLKDAFTSFGEVVEARVITDRDTGKSRGFGFVSFSNGDDAKNAMSSMDGQELEGRNIHVNFANERPAGNRGFSGGGSYGGGGGGAYGGGYGSGNQSYGNSSFGGSGGQDVF

SEQ ID NO: 948 - protein, 132 aa, Euphorbia lagascae
MAFCNKLGSLLRQSVSQSGHMLNSMRYMSTRLFVGGLSWGTDEQSLRDAFSSFGEVTSAKVITDRDTGKSRGFGFVDFDCTDSANSALSSMDGQELQGRNIRVSLANDRPERSNNRGFNNNYQGNRGFGGDF

SEQ ID NO: 949 - protein, 245 aa, Glycine max
MAFFGRIGNLLRQTASRQVSSELRSSPSFFQAIRSMSSAPSTKLFIGGVSYSTDEQSLREAFSKYGEVVDARIIMDRETGRSRGFGFITYTSVEEASSAIQALDGQDLHGRPIRVNYANERPRGYGGGGFGSYGAVGGGGYEGGSSYRGGYGGDNYSRNDGSGYGYGVGNHESSTGFASNGYDGSVVDGGVGAGSGTSFADGYDGSAGSEFGSSGQLDSKASSKGDEDFGDYRDDNDADDFAKRA

SEQ ID NO: 950 - protein, 168 aa, Hordeum vulgare
MAALIKLGSLLRQSAFASSASTGSAPALFNAARFMCAGQSGPSSKLFVGGLAWGTDDHSLKEAFQSFGEVTEARVITDRETGRSRGFGFVSFASEEDARNADKGMDGQELGGRNGRVNFANERPSGGGGLRAGGGGGYGGGGGGYGGGGGYGGGGGRDYGGGGGRDSF

SEQ ID NO: 951 - protein, 116 aa, Hordeum vulgare
MAALIKLGSLLRQSAFASSASTGSAPALFNAARFMCAGQSGPSSKLFVGGLAWGTDDHSLKEAFQSFGEVTEARVITDRETGRSRGFGFVSFASEEDAGNAAKAWTVRSLGEGTSV

SEQ ID NO: 952 - protein, 299 aa, Hordeum vulgare
MAFLQKVGNALKRSAGSSSAMLQAVRSMSSSKVFVGGISYGTDDQSLGDAFSNYGQVTEAKVIMDRESGRSRGFGFVTFTSSEEAGAAITGMDGKDLQGRIVRVSYAHDRGSRPSFGGGGGYGGGGGGGYGGGDGGYSGGGGAYGGGGGYSGGGGYGGGGRGGGGGYNSGGNYGAPQGGQGGYGGDAGFTGVGGGGGYNAAPANNYGGDSLNQGGGAPPAFGGGNFGAGNDSYADDAPVDLPPEKLNDLLKGLKFDVAGKEGGAGEGEGAGVVDVDTKEDDFLDDDLSKDEDDYVNKRS

SEQ ID NO: 953 - protein, 168 aa, Hordeum vulgare
MAALIKLGSLLRQSAFASSASTGSAPALFNAARFMCAGQSGPSSKLFVGGLAWGTDDHSLKEAFQSFGEVTEARVITDRETGRSRGFGFVSFASEEDAGNAAKGMDGQELGGRNVRVNFANERPSGGGGFRAGGGGGYGGGGGGYGGGGGYGGGGGRDYGGGGGRDSF

SEQ ID NO: 954 - protein, 149 aa, Linum usitatissimum
MAFYSKLGSLVRQSVSQSGPAPMGSMFNSIRCMSSNKLYIGGLSYSTDDHSLKEAFDRYGEVVDAKVILDRETGRSRGFGFVNFADNEAANSAVSSMDGQELHGRNIRVSIANEKPSAPRSYDSGSRGGGGYGGGGGSRGYGGRDDDGF

SEQ ID NO: 955 - protein, 144 aa, Nicotiana sylvestris
MAFYNKLGGLLRQSISGNAVSATSPMPSMLDAVRCMSTKLFVGGLSWGTDDQSLRDAFATFGDVVDARVIVDRDSGRSRGFGFVNFSDDECANEAIKAMDGQELQGRNIRVSIAQERAPRSGGFGGSGGGFGGGYGQARDNDGY

SEQ ID NO: 956 - protein, 277 aa, Nicotiana tabacum
MAFFNRVGSILKQSVSKHSNLELSASNASLFQAIRSMSSSKLFVGGLSYGTDESSLKEAFSQYGDVIEARVIMDRDTGRSRGFGFISFPSSEEAASALQAMDGQDLHGRRIRVNYATEKRRAGFGGGYGGGGGGFNYGGEGGNSAGAGGYPTNNYGGGFSGGNTSAGGYGSYGGGSNYGNDNSSPAEGGVGYGSANYGNTPNSNYSGPGNSFSGGYDGGNNGNGFGESPGASFNGGQEQVSVDQGTQSINEDIGQETSEGNYRDDDDEPKDFANSRG

SEQ ID NO: 957 - protein, 501 aa, Oryza sativa
MAFAGRVVNALRRTSVSSNPSLLQAVRCMSSKLFVGGLSYATDDTTLKDVFSHYGDVLEARIIIDRDTGKSKGYGFITYTSSEEAAAAVTAMDGKDLQGRIVRVSTANDRAGGIRGGGGFGAGGYGSGGGYSSGGGYGTGEYGRGGGYAGNGGYGGRASEYGGYGAGGYSSSGGYNATSVLHGNAGGYGSSEALMFTILPTPMALATSAIVVSPVAASVETTVELVVDDLVPPVAATSTTLPTSAMVVVALVKTVVDITADNLVPRVTAMAATLPATSVMLALVQTVVYLAVDNLVPPVATTVATRPATSASVAALVQTMVELAVDNLVPWVTAMEATLPATSAVVAALVQTVVDPAMDNMVPRMATTAATSATVAALVHKWWEQEKDIPENGPPLDCEAELPPLVLLFAAPAPGAPPPAPAPGAPSPPAAPAAAPARGADMAMARMSSRVGSTPQKPDHPPTRCRSQAKVSLRTLTGTGLPFASPLFGAYKSNSRPFMSI

SEQ ID NO: 958 - protein, 317 aa, Oryza sativa
MAFLRKVGNLVRQSAGSGSPLFQAVRCMSSSKLFIGGISYGTDDQSLKEAFANYGEVIEARVIVDRTTGRSRGFGFVTYTSTDEAAAAITGMDGKDLQGRIVRVSYAHDRGSRAGGYGGGGYSGQGTYGGGGGYGGGGYGGQDAYGGRGVGGYSEGGRGYVGGGYGDGNNYGGYNTSGGYNSEGGRGGYSVFEGGHGYGSGGTGYTGGSGGYNSAPGNYSSDNFNQGGAAPGAYEGANYGGGNNYMNNATSDDSTGKLDELLNDLKVDGDGKEDGEGKADGAGLVNEDLKGDDGQDELLQNDFKDEDVSDDYANKRR

SEQ ID NO: 959 - protein, 150 aa, Oryza sativa
MAAFNKLGSFLRHSGLTSSASAGSSPAMFNAARLMSTKLFVGGLSWNTNDDSLKEAFTSFGDVTEARVINDRESGRSRGFGFVSFANGDDAKSAMDAMDGKELEGRSIRVNFANERPPGNRGGGGYGGGGGGYGNQGGYGDGNRGYGGQY

SEQ ID NO: 960 - protein, 157 aa, Physcomitrella patens
MAFFAKFGGLLRHNSAQAAMMKSGLGAGAAAVPAMLMAQRFMSSSKLFIGGLAWATDENTLRDAFGSFGTVTDVKIILDRDTGRSRGFGFVNFTSPQEAEVALQEMDGRELAGRQIRVDYATDKSDGAPRGGGGGGGWRGNYGDRQSSGGRFDSNRD

SEQ ID NO: 961 - protein, 155 aa, Physcomitrella patens
MAFLAQLGGLVRQSIARNALQRHSGAAAIPAMFLVSRGMSGSKLFVGGLAWGTTDDNIKEAFSAFGEVTEVKIICDRDTGRSRGFGFVTFATDQDAEAALQALDGRDLAGRTIRVNYATKQSPQDRQSGGGMYGRRDHSGGNSGNFGGSGTWRGM

SEQ ID NO: 962 - protein, 133 aa, Populus trichocarpa
MAFFNKLGSLARQSISQKGQVPMVSMLNTIRCMSSSKLFIGGLPWSADDQTLKDAFSGFGEVTEARVIMDRETGRSRGFGFVHYDSVENASEALSAMDGQNLGGRTVRVSFAEERRPPQSYNDNHQGSRGFDN

SEQ ID NO: 963 - protein, 157 aa, Picea sitchensis
MAFAAKLGSLLKQSVTKHVSSRPSVYMPAIYSAFRCMSSKVFVGGLSYGVDDQTLRESFATFGDVMEAKIINDRETGRSRGFGFVTFASPDEANAAVEAMDGKDLQGRSIRVNIAQERTFGGGGFGGGGGGGYSGGGGGSYSGGGGGGSYSGGGGGW

SEQ ID NO: 964 - protein, 221 aa, Picea sitchensis
MSFASKVGSLLRQGISGRLGFNETRSVPSIYHALRYMSSSRLFIGGLSYGMDDQSLRESFTEYGEVIEARIIHDRETGRSRGFGFISFTSNEEAAAAITGMDGKDLHGRLVHVNYATERTGGFRSGGGGYGGGGGYNQNDGYGTGGGGYSQNDGYGTGGGGSSQNDGYVTGGGYSQNDGNASGGSYSQSAGYDGTSEGTSTGRTKDDFGYDDNVGNAGKGY

SEQ ID NO: 965 - protein, 146 aa, Pisum sativum
MAFCNKLGNLLRQGATQSSHAPVSSMLNYLRHMSSSKLFIGGLSYGVDDQSLKDAFASYGEVVEARVITDRDTGRSRGFGFVNFTSDESATSALSAMDGQDLNGRNIRVSYANDRPSAPRGGGGGYGGGYGDGFSNRGGGGGGGGW

SEQ ID NO: 966 - protein, 241 aa, Populus trichocarpa
MAFLTKLGNMLRQTANRQITSEISASRPSIYQALRCMSSSKIFIGGISFQTDDNGLKEAFDKYGNVVEARIIMDRDTGRSRGFGFVTYTSSEEASSAIQAMDGQDLHGRRVRVNYATERPQRTFNNNYGNYGGGGYGGGGGGYGGGGGGYGTGGGYGSNYAGQSTYDGGAGNYGAAAGGGRSDGYTNTSVDGGYDGNAGLGYGGGNQFGANESSGDGLNLDDALDKNSKEDDDAGDFAKRV

SEQ ID NO: 967 - protein, 147 aa, Sorghum bicolor
MAAFNKLGSLLRHSALASGVAASSSPAVFNAARLMSTKLFVGGLSWGVDDMKLREAFSGFGDVTEARVITDRDTGKSRGFGFVNYTSSDAANAAISGMDGKEIDGRPVRVNIANDRPAGNRGGGGYGGGGFGGGGYGGGNQSYGGGY

SEQ ID NO: 968 - protein, 250 aa, Sorghum bicolor
MALANKLGGLLKKATSSNPSVYQAIRCMSSKLFVGGLSYGTDDHSLRDEFAKYGEVIEARIILDRESGRSRGFGFVTYTSSEEASAAITAMDGKTLDGRSIRVNHANERTGGFRGSGGGGYGGGGFGGGGYGGGGGGYGGGGGGYGGGYGGNYGNRGGGGYGGGVGDYGAAGGAGGNFAAGGSNSFASSNFGADSGFGGNPAGSFGGGSTGADEFSGGTFGGDLSGNKNDEIMEDMFKDDEPDSFADKRS

SEQ ID NO: 969 - protein, 257 aa, Solanum lycopersicum
MAFFNKAGSILRQAVSKQHINHEISASKPSIFQLIRCMSSKLFVGGISWNTNDNSLQEAFSKYGEVVEARIIYDRESGRSRGFGFVTFNTSEDASAAIQALDGQELDGRRIRVNVANDRTRGYGGGYGGGNFGGGGGYGGGGNYGSGGYGGGGGNYGSGGGNYGASGYGSSGNYGSAGGVDANIASSYGSGESNFGFGTSGDNYASGSTDAAASNSFSFGNDTTSNQAEASDVNSPVDAGENYRDDNDSNDYADRRA

SEQ ID NO: 970 - protein, 175 aa, Triticum aestivum
MAALIKLGSLLRQSAVASSASTGSAPALFNAARFMCAGQPADGNKLFVGGLAWATDDHSLKEAFQSFGEVVEARVITDRETGRSRGFGFVSFANEEDAKSAAKNMDGKELAGRNVRVNFANERPSGGGGGGFSRGGGGYGGGGGGDGGGGYGGGGGDDGGRGRGGGGYGGDHEAY

SEQ ID NO: 971 - protein, 219 aa, Triticum aestivum
MALVNKLGNLLKKATSSNPTLYQAIRCMSSSKLFVGGLSFNTDEGSLRDAFSHYGEIIDAKIIVDRDTGRSRGFGFITYAAEEQASSAIMALDGKDLHGRNLRVSAATERTAGFRNGAGYGGGGGGFGGGGYGGGGYGGGGYGSNSGGGGDNFAAGNFGGASGFGGNPAGNHGAPAGSTGGDEFSLGTPGSTFESTKNDDVMEDLFKDDEPDKYASKNV

SEQ ID NO: 972 - protein, 173 aa, Triticum aestivum
MAALIKLGSLLRQSAVASSASTGSAPALFNAARFMCAGQPADGSKLFVGGLAWATDDHSLKEAFQCFGEVVEARVITDRETGRSRGFGFVSFASGEDAKSAAENMDGKELAGRNVRVNFANERPSGGGGGGGFSRGGGGYGGGGGGYGGGGFGGGGGYGGGRGGGGGGYGGDR

SEQ ID NO: 973 - protein, 176 aa, Triticum aestivum
MAALIKLGSLLRQSAVASSASTGSAPALFNAARFMCAGQPADGSKLFVGGLAWATDDHSLKEAFQCFGEVVEARVITDRETGRSRGFGFVSFASGEDAKSAAENMDGKELAGRNVRVNFANERPSGGGGGGGFSRGGGGYGGGGGGYGGGGFGGGGGYGGGRGGGGGGYGGDRESY

SEQ ID NO: 974 - protein, 277 aa, Vitis vinifera
MAFFGKVGNILRQTVSKQVNSQFSVSNPSIYQAIRCMSSSKLFIGGLSYSTDDTSLREAFHKYGEVIEARVIVDRETGRSRGFGFVTFTSSEEASSAIQALDGQDLHGRRVRVNYATDRARSGGFGGGGGYGGGGGGYGGGGYGGGGYGGSGGYGGGGYGGGSGGYGGGGDSYGSGGGNYGSGGGGYGGSSGGYGSGGNFSVAGGSDNYVGGAAGSSSGFPSGGGSSFASGGADQLGTNESSSVGDGAGEFSPDEPATEGNYRDDDDEPDDYANRRA

SEQ ID NO: 975 - protein, 251 aa, Zea mays
MMLANKLGGLLKNATSSKSSNMSVYQAIRCMSSSKLFVGGLSYGTDDHSLRDEFAKYGQVIEAKIILDRESGRSRGFGFITYTSSEEASAAITAMDGKTLDGRNIRVNHANERTGGFRSSGGYGGGYGGGYGGGSGGYGGGGSGDYGGGSGGYGGNYGNRAGGGYGGGGDYGVAGGAEGSFAAGGSDSFGSSNFADSGFGENPAGSFGATGGSSGADGFSAGTPGDGNKNDEIMDDLFKDDEPDSYANKRS

SEQ ID NO: 976 - protein, 247 aa, Zea mays
MALANKLGGLLKKATSSNPSVYQAIRCMSSKLFVGGISYQTDDHSLRDEFAKYGQVIEARIIIDRESGRSRGFGFVTYTSSEEASAAITALDGKTLDGRSIRVNHANEKTGGFRGGGGYGGGGYGGGGGYGGGGGHYGGGGGSGGYGGGDYGGNYSNRGGGGDYGVAGGGGGTFTAGGSDSFANSNFGSDSSFGGNGAGGFDATGGSTGDDGFSGTPDDNFGGNKNEETMDDIFKDDEPDSYADKRS

SEQ ID NO: 977 - protein, 144 aa, Zea mays
MAFCKNLGGLLRQGAVSQTGNVPVQSMLGSLRYMSTKLFVGGLSWGTDDQSLREAFSNFGEVIDSKVIVDRETGRSRGFGFVNFSDESAANAAISEMDGKELNGRNIRVNVANDRPSAPRAYGGGGGYGGGGGGYGGGGDGGGY

SEQ ID NO: 978 - protein, 175 aa, Zea mays
MAALIKLGSLLRQSAVASSASTGSAPALFNAARFMCAGQPADGSKLFVGGLAWATDDHSLKEAFQSFGEVVEARVITDRETGRSRGFGFVSFASGEDAKSAAENMDGKELAGRNVRVNFANERPSGGGGGGFSRGGGGYGGGGGGYGGGGYGGGGGYGGGRGGGGGGYGGDHESY

SEQ ID NO: 979 - protein, 153 aa, Zea mays
MAAFNKLGGLLRHSALVSGITGGSSPAVFNAARLMSTKLFIGGLDWGVDDVKLREAFSSFGEVTEARVITDRETGRSRGFGFVNYSDSDAAKEAISAMDGKEIDGRQVRVNMANERPAGNRGGGGYGGGGYGGGGYGGGGGYGGGGLIYRFAL

SEQ ID NO: 980 - protein, 308 aa, Zea mays
MAFASRIGNALRRTLAPTCSPLLQPVRCMSSSKLFVGGLSFATDETTLKDAFSEFGNVLEARIIIDRESGRSRGFGFITFTSTEEASAAMTSMDGKELQGRNIRVNHANERAGGIRGGGGFGAGGGYGGGGGYPTGGYGGGGYSSGGGGGYSSGGGGGYSSGGYAANGYGVGSGSGYGGTYSNASGGGYSGSDGYGNGAASGGYANNLSSGYNSNGRYNTIGSSDGNTGGYNSSPNPYGVGNYNTGGSSSSGGTLGEFGGGGFGGNNFAGNVTGGFSGGGASYGANKPQYNGDDDLLGEGFFDKEVAE

SEQ ID NO: 981 - protein, 306 aa, Mesembryanthemum crystallinum
MSSATANPCLKTLSLSHNCFTTSLYTPSIFNPKSHNFSIPLKPTKLNLSISVFSPFSPQKSSTIVSYVAQTSDWDQESSNALLDDEQQVGGATWGTQNFGDSEPQVSGVGNEDEEESEQGFSEPPEEAKLFVGNLPYDVDSERLAQIFDGAGVVEIAEVIYNRETDRSRGFGFVTMSTVEEAEKAVEMLNGFDMNGRLLTVNKAAPRGSRPERPPREFEPSCRVYVGNLPWDVDNARLEQVFSEHGKVLSARVVSDRETGRSRGFGFVSMASESEMNDAIAALDGQTLDGRAIRVNVAEERPRRAF

SEQ ID NO: 982 - protein, 292 aa, Nicotiana plumbaginifolia
MASSSVSSLQFLFVTSQTPSSLKPNSTLSFFSLPSSSLNLSLSSSSIGHSASIKPFESSFSTRVALSDFDQLEDDVEVAEQPRFSEDLKLFVGNLPFSVDSAALAGLFERAGNVEIVEVIYDKLSGRSRGFGFVTMSTKEEVEAAEQQFNGYEIDGRAIRVNAGPAPAKRENSSFGGGRGGNSSYGGGRDGNSSFGGARGGRSVDSSNRVYVGNLSWGVDDLALKELFSEQGNVVDAKVVYDRDSGRSRGFGFVTYSSAKEVNDAIDSLNGIDLDGRSIRVSAAEERPRRQF

SEQ ID NO: 983 - protein, 315 aa, Nicotiana sylvestris
MSCATKPIIKPSSMATNSCLISLPPLFATTTKSKSFAYPYLSNTLKPIKLLHLSCTYSPCILSPKKKTSVSALQEEENTLILDGQGQESGDLFNFEPSGEETEEEGFVEAVGDAGESDEVEADEEEEEFQEPPEDAKLFVGNLPYDVDSEGLARLFEQAGVVEIAEVIYNRDTDQSRGFGFVTMSTVEEAEKAVEMYNRYDVNGRLLTVNKAARRGERPERPPRTFEQSYRIYVGNIPWGIDDARLEQLFSEHGKVVSARVVYDRETGRSRGFGFVTMASEAEMSDAIANLDGQSLDGRTIRVNVAEDRSRRNTF

SEQ ID NO: 984 - protein, 273 aa, Nicotiana sylvestris
MASSASSLHFLSLTPQTLPLPKPTSQTTSLSFFSLPPSSLNLSLSSSSSCFSSRFVRKVTLSDFDQIEDVEDGDDGVEEERNFSPDLKIFVGNLPFSADSAALAELFERAGNVEMVEVIYDKLTGRSRGFGFVTMSSKEEVEAACQQFNGYELDGRALRVNSGPPPEKRENSSFRGGSRGGGSFDSSNRVYVGNLAWGVDQDALETLFSEQGKVVDAKVVYDRDSGRSRGFGFVTYSSAEEVNNAIESLDGVDLNGRAIRVSPAEARPPRRQF

SEQ ID NO: 985 - protein, 264 aa, Oryza sativa
MAATLFSTSLTPTFLPAVPCPKPAPPASACFPCALPPRAALAAPPAPLRRRLSPVAVAVSSEVEEEEGGAESEGEFAEDLKVFVGNLPFSVDSAQLAGLFEQAGSVEMVEVVYDRQTGRSRGFGFVTMSTAEEAGAAVEQFNGYTFQGRPLRVNSGPPPPRDDFAPRSPRGGGSNFDSSNKLYVGNLAWGVDNSTLENLFSEQGTVLDAKVIYDRESGRSRGFGFVTYGSAEEVNNAISNLDGVDLDGRQIRVTVAESKPRRQF

SEQ ID NO: 986 - protein, 312 aa, Persea americana
MSSATPLFKPFPMVPSSPILFSSKPPCPFLPIPSKPIKLIHLSTSSSSWVSFKKSPSPSSRSLTTLVAQTSDWAQQEEDSNVAEATLSDWEGEGEGEGEEQTESGAEDGEESGGDGFVEGGEEDSYPLPPEEAKLFVGNLPYDVDHQALAELFDQAGTVEVAEVIYNRETDQSRGFGFVTMSTVEEAEKAVEMFNRYDINGRLLTVNKAAPRGARVDRPPRAFEPAFRMYVGNLPWQVDDARLEQVFSEHGKVVEARVVYDRETGRSRGFGFVTMSTQTELDDAIAALDGQSLDGRAIRVNVAEDRPRRASF

SEQ ID NO: 987 - protein, 299 aa, Picea sitchensis
MAMAAASSCVFSSSSIISNDRLSASLKRLDPATKRKAGAPVEIVSMISSPNCAGTRSFSLAAGFCGVPLFSSTHKKNNNSFLARSVTMAPRQASEWEEDEEEDIENSSPSANLKVFVGNLPWSVDSAELAELFKDSGDVTMVEVIYDRQTGRSRGFAFVTMATQADADEAVEKFNGYEYQGRTLRVNSGPPPPKDSFAPRGGFRNEKPSGNYNSANRVFVGNLPWGADDLSLEQLFSDHGKVMEAKVVYDRETGRSRGFGFVTLSSPQEIEEAISSLDGSDMDGRQIKVTLAETKPASF

SEQ ID NO: 988 - protein, 290 aa, Picea sitchensis
MASSVTLSNSLSVIGGRPSVPSARHDVFPAAVTLAFPSSLFRSLSLSVSSASWPPAAAASIRKRGGVKRAPVMANASEWEQDVGVKTQEEGEEGAGDGEIDFENEFVELPEGTKLFVGNLPFNLDNQQLGELFEGAGEVLDVNIITDRETGNSRGFGFVTMGTVEEAEKGVELFNRHSLEGRLLTVNKAAPRGTKVERPSQAGSSTNKIYVGNLPWQADDNSLLQLFSEHGKVLEARVVYDRETGRSRGFGFVTYSSESEVNDAIAALDGTDMDGRPLRVNIAEDRRRGF

SEQ ID NO: 989 - protein, 198 aa, Spinacia oleracea
MGDDDAGRQPNFSPDLKIFVGNLPFNVDSAELAGLFGAAGTVEMVEVIYDKLTGRSRGFGFVTMSSVEEVEAAAQQFNNYELDGRTLRVTEDSHKDMTLPRVESECDSFGSSNRVHVGNLSWKVDDDALKTLFSETGDVVEAKVIYDRDTGRSRGFGFVTYNSANEVNTAIESLDGVDLNGRSIRVTAAEARQRRGPK

SEQ ID NO: 990 - protein, 168 aa, Adonis aestivalis
MASADVEYRCFVGGLAWATDDKSLEKAFGAFGEILESKIINDRETGRSRGFGFVTFANQQAMQDAIEQMNGQELDGRNITVNEAQSRGSGGSRSGGGGGGYQSGGGGYGGGGGGGYGGRREGGGGGYGGGGGGYGGRREGGGGGRGYGGGGGDRYSSRGGGDSDSWRS

SEQ ID NO: 991 - protein, 175 aa, Chorispora bungeana
MASADVEFRCFVGGLAWATDDRALETAFSQYGDVVDSKIINDRETGRSRGFGFVTFKDEKSMKDAIEGMNGQDLDGRSITVNEAQSRGSGGGGGGRGGGGGGYRSGGGGGYGGGGGSYGGGGGRREGGYSGGGGGYPSRGGGGGGYGGGGGRREGGYGGGESGGYGGSGGGGGGW

SEQ ID NO: 992 - protein, 181 aa, Cryptomeria japonica
MASADVEFRCFVGGLSWSTDDRSLKDAFTAFGEVMDSKVVSDRETGRSRGFGFVTFMDEQSMRDAIEGMNGRDLDGRNITVNRAQARGGGGGGGGGGGGYRGGGGGSGGYGGGGSGGYESRRSGGGGSGGGGYSGGGRERSERGYGGGSRNGGGYGGYSGGGGGGSRYGGGGVSDDGGWRS

SEQ ID NO: 993 - protein, 163 aa, Dianthus caryophyllus
MAEVEYRCFVGGLSWGTDDRSLAEAFNKFGEVTDSKIINDRETGRSRGFGFVTFANEQSMRDAIDEMNGKELDGRSITVNEAQSRGSGGGGGGGGYRSGGGGGGGYGGGGGGYGGRREGGGGGGYGGGSGGGYGGRREGGGGGGYGGGGGGGYRGNSDGNWRN

SEQ ID NO: 994 - protein, 124 aa, Glycine max
MASADVEYRCFVGGLAWATDDHALERAFSQYGEIVETKIINDRETGRSRGFGFVTFASEQSMKDAIGAMNGQNLDGRNITVNEAQSRGGRRTRTLRRRHASAPENANSETRTLPLCPNNNNSTQ

SEQ ID NO: 995 - protein, 171 aa, Glycine max
MASSDVEYRCFVGGLAWATDDQALERAFSQYGEIVETKIINDRETGRSRGFGFVTFASEQSMKDAIEGMNGQNLDGRNITVNEAQSRGGGGGGGGGGGGYGGGRGGGYGGGGRGGGGGYNRSGGGGGYGGGGGYGGGGGGGYGGGRDRGYGGGGDRGYSRGGDGGDGGWRN

SEQ ID NO: 996 - protein, 160 aa, Glycine max
MASADVEYRCFVGGLAWATDDHALERAFSQYGEIVETKIINDRETGRSRGFGFVTFASEQSMKDAIGAMNGQNLDGRNITVNEAQSRGGGGGGGGGGGGYNRGGGGYGGRSGGGGGGGGYRSRDGGYGGGYGGGGGGGYGGGRDRGYSRGGDGGDGGWRN

SEQ ID NO: 997 - protein, 153 aa, Hordeum vulgare
MADVEYRCFVGGLAWATDDQSLQNAFSKYGDVIDSKIITDRETGRSRGFGFVTFASDEAMRQAIEAMNGQDLDGRNITVNEAQSRRSGGGGGGFGGGGGGYGGQRREGGGGGYGGGGGGYGGGRTGGSGGYSSRDGGGGGYGGSCRGYCGSRS

SEQ ID NO: 998 - protein, 175 aa, Hordeum vulgare
MAETEYRCFVGGLAWATDDHNLQAAFSQYGEILDAKIINDRETGRSRGFGFVTFGSEESMRQAIEEMNGKELDGRSITVNEAQSRRSGGGGGGGGGYGGQRGGGGGYGGGGGYGGQGGGYGGQGGGGYGGQGGGGYGGQRGGGGGYGGGGGGYGGGGGGYGGQRGGGDSGGQWRS

SEQ ID NO: 999 - protein, 161 aa, Hordeum vulgare
MADVEYRCFVGGLRWATDDQSLQNAFSKYGDVIDSKIITDRETGRSRGFGFVTFASDEAMRQAIEAMNGQDLDGRNITVNEAQSRRSDGGGGFGGGGGGYGGQRREGGGGGYGGGGGGYGGGRSGGGGGYGSRDGGGGGYGGGGGGYGGSRGGSGGGNWRE

SEQ ID NO: 1000 - protein, 156 aa, Nicotiana glutinosa
MAEVEYRCFVGGLAWATTDQTLGDAFSQYGEILDSKIINDRETGRSRGFGFVTFKDEQAMRDAIEGMNGQDLDGRNITVNEAQSRGSGGGGGGYRGGRGGGGGGYGGGGRREGGYGGGGGGYGGGRREGGYGGGGGYGGGRREGGYGGGSEGNWRN

SEQ ID NO: 1001 - protein, 157 aa, Nicotiana tabacum
MAEVEYRCFVGGLAWATTDQTLGDAFSQYGEIVDSKIINDRETGRSRGFGFVTFKDEQAMRDAIEGMNGQDLDGRNITVNEAQSRGSGGGGGRGGGGGGYGGGGGYGGGGRREGGYGGGGGGYGGGRRDGGYGGGGGYGGGRREGGYGGGSEGSWRS

SEQ ID NO: 1002 - protein, 162 aa, Oryza sativa
MAAPDVEYRCFVGGLAWATDDRSLEAAFSTFGEILESKIINDRETGRSRGFGFVTFSSEQAMRDAIEGMNGKELDGRNITVNEAQSRRSGGGGGGGYGQRGGGGGYGGGGGYGGGGGGGYGQRREGGYGGGGGYGGGRGGGGGYGGGYGSRGGGNSDGNWRN

SEQ ID NO: 1003 - protein, 161 aa, Oryza rufipogon
MAAPDVEYRCFVGGLAWATDDRSLEAAFSTYGEILDSKIINDRETGRSRGFGFVTFSSEQSMRDAIEGMNGKELDGRNITVNEAQSRRSGGGGGGYGGGGGGYGGGRGGGGYGGGGGGGYGRREGGYGGGGGYGGGRGGGGGYGGSRGGGYGGDSGGNWRN

SEQ ID NO: 1004 - protein, 161 aa, Oryza rufipogon
MAAPDVEYRCFVGGLAWATDDRSLEAAFSTYGEILDSKIINDRETGRSRGFGFVTFSSEQSMRDAIEGMNGKELDGRNITVNEAQSRRSGGGGGGYGGGGGGYGGGRGGGGYGGGGGGGYGRREGGYGGGGGYGGGRGGGGGYGGSRGGGYGGDFGGNWRN

SEQ ID NO: 1005 - protein, 138 aa, Oryza rufipogon
MAAPDVEYRCFVGGLAWATDDRSLEAAFSTYGEILDSKIINDRETGRSRGFVFVTFSSEQSMRDAIEGMNGKELDGRNITVNEAQSRRSGGGGGGYGGGGGGYGGGRGGGGYGGGGGGGYGGSRGGGYGGDSGGNWRN

SEQ ID NO: 1006 - protein, 165 aa, Oryza sativa
MAAPDVDYRCFVGGLAWATDNRSLEAAFSTYGEILESKIINDRETGRSRGFGFVTFSSEQAMRDAIEGMSGKELDGRNITVNEAQSRRSGGGGGGGYGQRGGGGGYGGRGYGGGGGGGGYGQRREGGYGGGGGYGGGGGGGGYGGGYGGGYGSRGGGNSDGNWRN

SEQ ID NO: 1007 - protein, 194 aa, Oryza sativa
MAAPDVEYRCFVGGLAWATDDRSLEAAFSTYGEILESKIINDRETGRSRGFGFVTFSSEQAMRDAIEGMNGKELDGRNITVNEAQSRRSGGGGGGGYGQRGGGGGYGGGGYGGGGGGGGYGQRREAATAVAVATVAAVVAAATVVATAAAAAATPTGTGGTERWGPHGQVIYLSNRATIIIIRSLSSLVLCGTI

SEQ ID NO: 1008 - protein, 161 aa, Oryza sativa
MAAPDVEYRCFVGGLAWATDDRSLEAAFSTYGEILESKIINDRETGRSRGFGFVTFSSEQAMRDAIEGMNGKELDGRNITVNEAQSRRSGGGGGGGYGQRGGGGGYGGGGYGGGGGGGGYGQRREGGYGGGGGYGGGRGGGGYGGGYGSRGGGNSDGNWRN

SEQ ID NO: 1009 - protein, 162 aa, Oryza sativa
MAAPDVEYRCFVGGLAWATDDRSLEAAFSTYGEILDSKIINDRETGRSRGFGFVTFSSEQSMRDAIEGMNGKELDGRNITVNEAQSRRSGGGGGGYGGGGGGYGGGRGGGGYGGGGGGGYGRREGGYGGGGGYGGGRGGGGGGYGGSRGGGYGGDSGGNWRN

SEQ ID NO: 1010 - protein, 161 aa, Oryza sativa
MAAPDVDYRCFVGGLAWATDNRSLEAAFSTYGEILESKIINDRETGRSRGFGFVTFSSEQAMRDAIEGMNGKELDGRNITVNEAQSRRSGGGGGGGYGQRGGGGGYGGGGYGGGGGGGGYGQRREGGYGGGGGYGGGRGGGGYGGGYGSRGGGNSDGNWRN

SEQ ID NO: 1011 - protein, 160 aa, Oryza sativa
MAAPDVEYRCFVGGLAWATDDRSLEAAFSTFGEILESKIINDRETGRSRGFGFVTFSSEQAMRDAIEGMNGKELDGRNITVNEAQSRRSGGGGGGGYGQRGGGGGYGGGGGYGGGGGGGYASREGGYGGGGGYGGGRGGGGGYGGGYGRGGGNSDGNWRN

SEQ ID NO: 1012 - protein, 142 aa, Oryza sativa
MAAPDVEYRCFVGGLAWATDDRSLEAAFSTYGEILDSKIINDRETGRSRGFGFVTFSSEQSMRDAIEGMNGKELDGRNITVNEAQSRRSGGGGGGYGGGGGGYGGGRGGGGYGGGGGGGYGRREGGYGGGGYGGDSGGNWRN

SEQ ID NO: 1013 - protein, 231 aa, Oryza sativa
MAAPDVEYRCFVGGLAWATDDRSLEAAFSTYGEILDSKIINDRETGRSRGFGFVTFSSEQSMRDAIEGMNGKELDGRNITVNEAQSRRSGGGGGGYGGGGGGYGGGRGGGASTSHGLLLKRDLLTAMAELQCQGYWSFALSTLHVARAEPCHCLRRPLPASSASLSVSLKKRIEETKGKMIEKRRRKKKKKRKRREEMTQTCGAHCMPCQRNLEKLGQYCLGTFFFFLHSL

SEQ ID NO: 1014 - protein, 137 aa, Oryza sativa
MAAPDVEYRCFVGGLAWATDDRSLEAAFSTYGEILDSKIINDRETGRSRGFGFVTFSSEQSMRDAIEGMNGKELDGRNITVNEAQSRRSGGGGGGYGGGGGGYGGGRGGGGYGGGGGGGYGRREGGYGGDSGGNWRN

SEQ ID NO: 1015 - protein, 155 aa, Picea glauca
MASADVEFRCFVGGLAWSTDDRSLQEAFSPYGEVVESKIISDRETGRSRGFGFVTFNDEQSMRDAIDAMNGKMLDGRSITVNPAQSRGNGGGGGGGGSRGYRGGGGGGGYGGSRDRGDRGYGGGGGGYGGGGGGYGGGGGSRYGGGGSEGGSWRR

SEQ ID NO: 1016 - protein, 172 aa, Picea sitchensis
MMASAEVEYRCFVGGLAWATDDRSLQDAFSPFGEILESKIISDRETGRSRGFGFVTFSDEQSMRDAIDAMNGKVLDGRNITVNPAQSRGNGGGGGGGGGRGFRGGGGGGYGGGRDRPDRGYGGGRGGGGSGGYGGRGGYGGGGGSRYGGGGGGGYGGGGYGGGGGSEGAWRR

SEQ ID NO: 1017 - protein, 165 aa, Populus trichocarpa
MAAEVEYRCFVGGLAWATTDQSLQEAFSQYGEIIDSKIINDRETGRSRGFGFVTFNNEKAMRDAIDGMNGQDLDGRNITVNEAQSRGSGGGGGGGGYSRGGGGGYGGRREGGGGGYSRGGGGYGGGGGGYGGGGGGYGGGRDRGYGDGGSRYSSRGGSDGGSWRD

SEQ ID NO: 1018 - protein, 178 aa, Prunus avium
MASAEIEFRCFVGGLAWATDNDALERAFSPFGEIIESKIINDRETGRSRGFGFVTFSNEKAMRDAIEGMNGQNLDGRNITVNEAQSRGSGGGGGGNGGGYSRGGGGGGYGGGGGYGGGGRREGGGGGYSRGGGGGGYGSGGGGYGGGGRREGGYGGGEGGGARYSRGSGGSEGGSWRS

SEQ ID NO: 1019 - protein, 165 aa, Ricinus communis
MAAADIEYRCFVGGLAWATSDKALEEAFSAYGEVLESKIINDRETGRSRGFGFVTFNNEKSMRDAIEGMNGQNLDGRNITVNEAQSRGGGGGGGGGYRNGGGGGYGGGRREGGYGGGGGYSRGGGGYGGGGGGYGGGRDRGYGGGGDGGSRYSRGGGASEGNWRS

SEQ ID NO: 1020 - protein, 168 aa, Rumex obtusifolius
MDAEVEYRCFVGGLAWATDDQSLERAFSNYGQVLESKIINDRETGRSRGFGFVTFSSEQAMRDAIEGMNGQDLDGRNITVNEAQSRGSGGGGGGYRGGGGGGYGGRREGGYNRGGGGGYGGGGGGYGGGGGGYGGGGGGYGGGRREGGYGGGGGDRYARGNSDSDWRN

SEQ ID NO: 1021 - protein, 170 aa, Sorghum bicolor
MAAADVEYRCFVGGLAWATNNETLEQAFANFGQVIDSKVITDRETGRSRGFGFVTFSSEQSMLDAIENMNGKELDGRNITVNQAQSRGGGGGGGGYGGGGGGYGGRREGGGYGGGGGGYGGRREGGGGYGGGGYGGGGGGYGGRREGGGGYGGGGGYGGNRGDSGGNWRN

SEQ ID NO: 1022 - protein, 166 aa, Sinapis alba
MASPDVEYRCFVGGLAWATDDRALETAFSQYGEVLDSKIINDRETGRSRGFGFVTFKDEKSMKDAIEGMNGQDLDGRSITVNEAQSRGSGGGGGGRGGGGGYRSGGGGGYGGGGGGYGGGGREGGYSGGGGGYSSRGGGGGGYGGGGRRDGGEGGGYGGSGGGGGW

SEQ ID NO: 1023 - protein, 169 aa, Sinapis alba
MASPDVEYRCFVGGLAWATDERSLETAFSQFGELVDSKIINDRETGRSRGFGFVTFKDEKSMKDAIEGMNGQDLDGRSITVNEAQSRGSGAGGGGRGGGGGYRGGGGYGGGGGGYGGGRREGGGYSGGGGGYSSRGGGGGGYGGGGRRDGGGYGGGEGGGYGGGGGGGW

SEQ ID NO: 1024 - protein, 162 aa, Solanum commersonii
MAAEVEYSCFVGGLAWATTDRTLSDAFSTYGEVVDSKIINDRETGRSRGFGFVTFKDEKSMKEAISGMNGSELDGRNITVNEAQARGSGGGGGGGGGFGGGRRREGGGGGYGGGGGYRGGGGGGYGGGRREGGGGGGYGGGRREGGGGGGYGGGGYGGGDRY

SEQ ID NO: 1025 - protein, 175 aa, Solanum tuberosum
MADVEYRCFVGGLAWATTDQTLSDAFSQYAEVVESKIINDRETGRSRGFGFVTFKDEQAMRDAIEGMNRQDLDGRNITVNEAQSRGGVEAGGGRGGGGYGGGRREGGGGGYGGYGGGRREGGGGGGYSGGGGGYGGGRREGGYGGGGGGYGGGDRYSDRSSRGGGGGSSDGNWRN

SEQ ID NO: 1026 - protein, 170 aa, Sorghum bicolor
MAAADVEYRCFVGGLAWATNNETLEHAFANFGQVLDSKVITDRETGRSRGFGFVTFSSEQSMLDAIENMNGKELDGRNITVNQAQSRGGGGGGGGYGGGGGGYGGRREGGGYGGGGGGYGGRREGGGGYGGGGYGGGGGGYGGRREGGGGYGGGGGYGGNRGDSGGNWRN

SEQ ID NO: 1027 - protein, 168 aa, Sorghum bicolor
MAAADVEYRCFVGGLAWATNNETLEQAFANFGQVIDSKVITDRETGRSRGFGFVTFSSEQSMLDAIENMNGKELDGRNITVNQAQSRGGGGGGGGYGGGGGGYGGREGGGYGGGGGGYGGRREGGGGYGGGGYGGGGGGYGGREGGGGYGGGGGYGGNRGDSGGNWRN

SEQ ID NO: 1028 - protein, 165 aa, Triticum aestivum
MADVEYRCFVGGLAWATDDQSLQNAFSKYGDVIDSKIITDRETGRSRGFGFVTFASDEAMRQAIEAMNGQDLDGRNITVNEAQSRRSGGGGGGFSGGGGGGYGGQRREGGGGGGYGGGGGGYGGGRSGGGGGYGSREGGGGYGSGGGGGGYGGSRGGSGGGNWRE

SEQ ID NO: 1029 - protein, 105 aa, Triticum aestivum
MADVEYRCFVGGLAWATDDQSLQNAFSKYGDVIDSKIITDRETGRSRGFGFVTFASDEAMRQAIEAMNGQDLDGRNITVNEAQSRRSGGGGGGFGGGSCGGYWRE

SEQ ID NO: 1030 - protein, 174 aa, Triticum aestivum
MAETEYRCFVGGLAWATDDHNLQQAFSQYGEILDAKIINDRETGRSRGFGFVTFGSEESMRQAIEEMNGKELDGRNITVNEAQSRRSGGGGGGGGYGGQRGGGGGYGGGGGGYGGQGGGGYGQGGGGGYGQGGGGYGGQRGGGGYGGGGGGYGGGGGGYGGQRGGGDSGGQWRN

SEQ ID NO: 1031 - protein, 181 aa, Triticum aestivum
MAETEYRCFVGGLAWATDDNNLQQAFSQYGEILDAKIINDRETGRSRGFGFVTFGSEESMRQAIEEMNGKELDGRNITVNEAQSRRSGGGGGGGGGYRGQRGGGGRYSRWQRLRRRRRRLRRTLRPEGKLILRDNAETISELEGMAKSLQWEVRMTYAKDKEGLLCVQKTTWRPKEIEASM

SEQ ID NO: 1032 - protein, 163 aa, Triticum aestivum
MADVEYRCFVGGLAWATDDQSLQNAFSKYGDVIDSKIITDRETGRSRGFGFVTFASDEAMRQAIEAMNGQDLDGRNITVNEAQSRRSGGGGGGGFGGGGGGYGGQRREGGGGGGYGGGGGGYRGGRSGGGGGYGSRDGGGYGGGGGGGYGGSRGGSGGGNWRE

SEQ ID NO: 1033 - protein, 167 aa, Triticum aestivum
MAETEYRCFVGGLAWATDDNNLQQAFSQYGEILDAKIINDRETGRSRGFGFVTFGSEESMRQAIEEMNGKELDGRNITVNEAQSRRSGGGGGGGGGYGGQRGGGGGYGGGGGYGGGGGGYGGQGGGGYGGQRGGGGGYGGGGGYGGGGGYGGQRGGGGGDSGGQWRN

SEQ ID NO: 1034 - protein, 156 aa, Zea mays
MAASDVEYRCFVGGLAWATDDHSLHNAFSTYGEVLESKIILDRETQRSRGFGFVTFSTEEAMRNAIEGMNGKELDGRNITVNEAQSRGGRGGGGGGYGGGRGGGGYGGGGRRDGGGGYGGGGGGYGGGGGYGGGGGGYGGGNRGGGYGNSDGNWRN
